(19) United States
(12) Patent Application Publication
(10) Pub. No.: US 2025/0134987 A1
(43) Pub. Date: May 1, 2025

(54) COMPOSITIONS AND METHODS FOR VACCINATION AGAINST PATHOGENIC CORONAVIRUS SPECIES AND VARIANTS

(71) Applicant: Yale University, New Haven, CT (US)

(72) Inventors: Sidi Chen, New Haven, CT (US); Lei Peng, New Haven, CT (US); Zhenhao Fang, New Haven, CT (US); Jonathan Park, New Haven, CT (US); Matthew Dong, New Haven, CT (US); Xiaoyu Zhou, New Haven, CT (US); Paul Renauer, New Haven, CT (US)

(21) Appl. No.: 18/701,454

(22) PCT Filed: Oct. 14, 2022
(86) PCT No.: PCT/US2022/078125

§ 371 Date: Apr. 15, 2024

Related U.S. Application Data
(60) Provisional application No. 63/256,235, filed on Oct. 15, 2021.

(51) Int. Cl. A61K 39/215; A61K 39/00; C07K 14/005

(52) U.S. Cl. CPC A61K 39/215; C07K 14/005; A61K 2039/54; A61K 2039/543; A61K 2039/544; A61K 2039/545; A61K 2039/575

(57) ABSTRACT

The current disclosure includes coronavirus vaccines that protect against pathogenic coronavirus species, as well as their variants. In certain embodiments, SARS-CoV-2 variant specific and multivalent coronavirus vaccines are described. The vaccines typically include a modified mRNA which encodes at least one coronavirus derived immunogen, such as a spike protein or a fragment thereof. The mRNA can be encapsulated into lipid nanoparticles or other carriers and formulated as pharmaceutical compositions which can be used to generate an immune response to coronavirus in a subject. The vaccines can be used to elicit potent B and T cell responses against SARS-CoV-2 variants and to confer protective immunity against SARS-CoV-2, as well as other pathogenic coronavirus species such as SARS-CoV and/or MERS-CoV.

### CROSS-REFERENCE TO RELATED APPLICATION

[0001] The present application claims priority under 35 U.S.C. § 119 (e) to U.S. Provisional Patent Application No. 63/256,235, filed Oct. 15, 2021, which is hereby incorporated by reference in its entirety herein.

### STATEMENT REGARDING FEDERALLY SPONSORED RESEARCH

[0002] This invention was made with Government support under W81XWH-21-1-0019 awarded by the Department of Defense. The Government has certain rights in the invention.

### BACKGROUND

[0003] Severe acute respiratory syndrome coronavirus (SARS-CoV-2), the pathogen responsible for coronavirus disease 2019 (COVID-19), has caused the ongoing global pandemic. Although lipid nanoparticle (LNP)-mRNA based vaccines such as BNT162b2 (Pfizer-BioNTech) and mRNA-1273 (Moderna) have demonstrated high efficacy against COVID-19, breakthrough infections have been widely reported in fully vaccinated individuals. Moreover, the virus has continued to mutate, and multiple dangerous variant lineages have evolved, such as B.1.1.7, B.1.351, and, more recently B.1.617. The B.1.1.7 lineage (Alpha variant, or “UK variant”) has an increased rate of transmission and higher mortality. The B.1.351 lineage (Beta variant, or “South Africa variant”) has an increased rate of transmission, resistance to antibody therapeutics, and reduced vaccine efficacy. The B.1.617 lineage (“Indian variant”, including B.1.617.1 “Kappa variant”, B.1.617.2 “Delta variant” and B.1.617.3) recently emerged, and has spread rapidly and become the dominant variant in multiple regions in the world. The on-going surge of infections in the US is predominantly caused by the Delta variant, originating from the B.1.617 lineage that has greater than one-thousand-fold higher viral load in infected individuals. The B.1.617 lineage has an increased rate of transmission, shows reduced serum antibody reactivity in vaccinated individuals, and exhibits resistance to antibody therapeutics. All these variants often spread faster than the original “wildtype” (WT) virus (also noted as Wuhan-Hu-1 or WA-1), cause more severe disease, are more likely to escape certain host immune response, cause disproportionally higher numbers of breakthrough infections despite the status of full vaccination, and have been designated by WHO and CDC as “variants of concern” (VoCs). Regarding effects on vaccine efficacy, B.1.351, for example, has been known to reduce the efficacy of the Pfizer-BioNTech vaccine from >90% to near 70%. The Delta variant has also resulted in significant reduction in vaccine efficacy, especially for individuals who received only a single dose, and has caused wide-spread breakthrough infections despite the status of full vaccination.

[0004] It has been widely hypothesized that the next-generation of COVID-19 vaccines can be designed to directly target these variants (“variant-specific vaccines”). However, to date, there is no known approved or clinical stage variant-specific vaccine. Even with the two leading RNA vaccines, many questions remain regarding the efficacy, durability, modes of action, effective populations, and breadth of protection against other coronavirus strains or species. Thus, there is an ongoing need for broadly efficacious vaccines that can elicit protective immune responses against multiple coronaviruses and for a highly efficient vaccine generation platform for rapid generation of new vaccine candidates.

### BRIEF SUMMARY

[0005] The disclosure generally relates to coronavirus immunogens, and specifically, compositions and methods for vaccination against coronavirus-related illnesses.

[0006] The disclosure provides in one aspect compositions and methods for preparing and expressing immunogenic viral peptides or proteins.

[0007] The disclosure provides in one aspect provide compositions and methods for delivering nucleic acids encoding immunogenic viral peptides or proteins.

[0008] The disclosure provides in one aspect compositions and methods for vaccination against individual coronaviruses, including SARS-CoV-2 variants of concern or interest.

[0009] The disclosure provides in one aspect multivalent coronavirus vaccines that can elicit protective immunity against multiple coronavirus species and variants.

[0010] Potent coronavirus vaccines to protect against pathogenic coronavirus species, as well as their variants have been developed. The working examples demonstrate development of lipid nanoparticle-based SARS-CoV-2 variant-specific vaccines, and evaluation of the immune responses, specificity, cross-reactivity, and host cell gene expression landscapes upon vaccination. LNP-mRNA vaccine candidates that encode the B.1.351 and B.1.617 spike proteins, along with the WT spike protein were generated. With these variant-specific LNP-mRNAs, the immune responses they induce in animals against homologous (cognate) and heterologous spike antigens and SARS-CoV-2 pseudoviruses were characterized. To understand the systematic immune responses induced by variant-specific SARS-CoV-2 spike mRNA-LNP vaccination, the combined single-cell transcriptomes and lymphocyte antigen receptor repertoires of mice immunized with the vaccines were analyzed. Thus, described herein are compositions, methods, kits and devices for the design, preparation, manufacture and/or formulation of polynucleotides which encode coronavirus peptides or proteins of interest, and are useful for the generation of vaccines.

[0011] Disclosed is an isolated messenger ribonucleic acid (mRNA) containing a 5′ untranslated region (UTR), a 3′ UTR, and an open reading frame encoding a spike protein sequence that includes all or a portion of a coronavirus spike protein. The coronavirus can be SARS-CoV-2, including variants thereof. In certain embodiments, the encoded spike protein sequence includes one or more mutations that stabilize the spike protein in a prefusion conformation. For example, the spike protein sequence can include all or a portion of the S2 subunit of the spike protein, and the one or more mutations can include one or more proline substitutions in the spike S2 subunit. Exemplary proline substitutions include F817P, A892P, A899P, A942P, K986P, V987P, and combinations thereof. In certain non-limiting embodiments, the spike protein sequence contains two (dual-Pro), four (quad-Pro) or six (hexa-Pro) of the foregoing proline substitutions. In certain embodiments, the amino acid positions of the one or more mutations are indicated relative to the native or wildtype SARS-CoV-2 spike protein sequence (Wuhan-Hu-1/WA-1) set forth in SEQ ID NO:2.

[0012] In certain non-limiting embodiments, the spike protein sequence further includes a cleavage site (e.g., S1/S2 protease cleavage site and/or S2′ protease cleavage site) of the spike protein. The cleavage site can include one or more mutations to inhibit protease cleavage of the spike protein. For example, in certain non-limiting embodiments the encoded spike protein sequence further includes one or more mutations at an S1/S2 protease cleavage site, an S2′ protease cleavage site, or a combination thereof that inhibit protease cleavage of the spike protein. In certain non-limiting embodiments, the protease cleavage site is a furin cleavage site. An exemplary furin cleavage site is RRAR (SEQ ID NO:15). In certain non-limiting embodiments, the furin cleavage site is deleted or replaced with a different sequence, such as GSAS (SEQ ID NO:11), GSSS (SEQ ID NO:16), or GSGS (SEQ ID NO:17).

[0013] In certain non-limiting embodiments, the variant of SARS-CoV-2 is selected from SARS-CoV-2 B.1.1.7 (Alpha variant), SARS-CoV-2 B.1.351 (Beta variant), SARS-CoV-2 B.1.617, In certain non-limiting embodiments, the variant of SARS-CoV-2 is selected from SARS-CoV-2 B.1.617.1 (Kappa variant), SARS-CoV-2 B.1.617.2 (Delta variant) and SARS-CoV-2 B.1.617.3. In certain non-limiting embodiments, the variant of SARS-CoV-2 is selected from SARS-CoV-2 B.1.1.529/BA.1 (Omicron variant), SARS-CoV-2 BA.1, SARS-CoV-2 BA.2, SARS-CoV-2 BA.2.12.1, SARS-CoV-2 BA.4, and SARS-CoV-2 BA.5.

[0014] In certain embodiments, the open reading frame of the mRNA encodes a spike protein sequence containing the amino acid sequence of any one of SEQ ID NOs: 2-10, 34, 46-54, and 57-60, or an amino acid sequence having 75% or more sequence identity to any of one of SEQ ID NOs: 2-10, 34, 46-54, and 57-60.

[0015] Also disclosed are chimeric (hybrid) mRNAs which encode chimeric (hybrid) spike proteins having sequences from different viral species or variants. For example, disclosed is an isolated, chimeric mRNA containing a 5′ UTR, a 3′ UTR, and two or more open reading frames, wherein each open reading frame encodes a different spike protein sequence, wherein each spike protein sequence includes a spike protein subunit from the spike protein of a distinct coronavirus species or variant thereof. In certain non-limiting embodiments, the two or more open reading frames include a first open reading frame and a second open reading frame. In certain non-limiting embodiments, the first open reading frame encodes a spike S1 subunit of a first coronavirus selected from SARS-CoV, MERS-CoV, and SARS-CoV-2, and the second open reading frame encodes a spike S2 subunit of a second coronavirus selected from SARS-CoV, MERS-CoV, and SARS-CoV-2.

[0016] In particular forms, (i) the S1 subunit is from SARS-CoV-2 B.1.351 and the S2 subunit is from SARS-CoV-2 B.1.617, such as but not limited to B.1.617.2; (ii) the S1 subunit is from SARS-CoV and the S2 subunit is from SARS-CoV-2 B.1.617, such as but not limited to B.1.617.2; or (iii) the S1 subunit is from MERS-CoV and the S2 subunit is from SARS-CoV-2 B.1.617, such as but not limited to B.1.617.2. In any of the foregoing, the S2 subunit can include one or more mutations, such as the proline substitutions described above, that stabilize the spike protein in a prefusion conformation. In certain non-limiting embodiments, the chimeric mRNA does not include a linker or other domain intervening between the first and second open reading frames.

[0017] In certain non-limiting embodiments of the chimeric mRNA, each open reading frame further contains a sequence encoding a SPY tag, such as but not limited to wherein the SPY tag is positioned at the C-terminus of the spike protein subunit. In such forms, the chimeric mRNA can further include a sequence encoding a 2A self-cleaving peptide between adjacent open reading frames. In certain embodiments, the disclosure provides a chimeric mRNA wherein the two or more open reading frames include three open reading frames, wherein (i) a first open reading frame encodes an S1 subunit of a SARS-CoV-2 variant, such as but not limited to SARS-CoV-2 B.1.351; (ii) a second open reading frame encodes an S1 subunit of SARS-CoV; and (iii) a third open reading frame encodes an S1 subunit of MERS-CoV. In certain non-limiting embodiments, each open reading frame encodes a SPY tag fused to the C-terminus of the S1 subunit and/or the mRNA further includes a 2A self-cleaving peptide between adjacent open reading frames.

[0018] Further provided is an isolated mRNA containing a 5′ UTR, a 3′ UTR, and an open reading frame, wherein the open readying frame encodes an S2 subunit of a coronavirus spike protein and a SPY catcher, wherein the SPY catcher is fused to the N-terminus of the spike protein S2 subunit. The coronavirus can be SARS-CoV, MERS-CoV, SARS-CoV-2, any other pathogenic coronavirus, or a variant thereof.

[0019] Any of the disclosed mRNAs can include a 5′ cap or an analog thereof, a poly(A) tail, one or more modified nucleotides, or a combination thereof. Suitable 5′ caps or analogs thereof include, without limitation, cap0, cap1, cap2, ARCA, beta-S-ARCA, inosine, m7G, N1-methyl-guanosine, 2′-fluoro-guanosine, 7-deaza-guanosine, 8-oxo-guanosine, 2-amino-guanosine, LNA-guanosine, tri-methylgranosine (TMG), nicotinamide adenine dinucleotide (NAD), cap AG, cap AU, cap GG, and 2-azido-guanosine. Suitable modified nucleotides include, without limitation, pseudouridine, N1-methyl-pseudouridine, N1-Methylpseudouridine-5′-Triphosphate-(N-1081), 1-ethylpseudouridine, 2-thiouridine, 4′-thiouridine, 5-methoxyuridine, 5-methoxyuridine, N6-methyladenosine, and 5-methylcytosine.

[0020] In certain non-limiting embodiments, the mRNAs are codon optimized for expression in a eukaryotic cell. In certain non-limiting embodiments, the mRNAs are produced by in vitro transcription.

[0021] Also provided are isolated polynucleotides (e.g., DNA) encoding the disclosed mRNAs. The polynucleotide can include one or more promoters and/or a polyadenylation signal operably linked to a sequence encoding the mRNA. In certain non-limiting embodiments, the polynucleotide is or is contained in a plasmid. In certain non-limiting embodiments, the polynucleotide is or is contained within a vector (e.g., an expression vector). In certain non-limiting embodiments, the vector is a viral vector, such as but not limited to an adeno-associated virus (AAV) vector.

[0022] Suitable AAV serotypes include, but are not limited to, AAV1, AAV2, AAV3, AAV4, AAV5, AAV6, AAV7, AAV8, AAV9, AAV10, AAV11, AAV12, artificial variants such as AAV.rhIO, AAV.rh32/33, AAV.rh43, AAV.rh64R1, rAAV2-retro, AAV-DJ, AAV-PHP.B, AAV-PHP.S, AAV-PHP.eB, and other engineered versions of AAV. In a particular form, the AAV vector is AAV9.

[0023] Methods of using the disclosed polynucleotides are also provided. For example, described herein is a method of producing a recombinant coronavirus spike protein stabilized in a prefusion conformation. Typically, the method involves introducing an appropriate disclosed polynucleotide or vector to a host cell and incubating the host cell under conditions sufficient for expression of the polynucleotide or vector, thereby producing the recombinant spike protein. Also disclosed is a method of producing a chimeric/hybrid coronavirus spike protein by introducing an appropriate disclosed polynucleotide or vector to a host cell and incubating the host cell under conditions sufficient for expression of the polynucleotide or vector, thereby producing the chimeric/hybrid spike protein. In certain non-limiting embodiments, the foregoing methods can further include purifying the spike protein from the cell.

[0024] Also provided are virus-like particles and lipid nanoparticles containing or encapsulating a disclosed mRNA, polynucleotide (e.g., DNA molecule), vector, and/or protein encoded by a disclosed mRNA, polynucleotide (e.g., DNA molecule), or vector. In certain non-limiting embodiments, a lipid nanoparticle includes two or more distinct mRNAs, wherein each mRNA contains an open reading frame encoding all or a portion of a coronavirus spike protein derived from a distinct coronavirus species or variant thereof. For example, in certain non-limiting embodiments, a lipid nanoparticle includes three distinct mRNAs each independently encoding all or a portion of a coronavirus spike protein, wherein the coronavirus is selected from MERS-CoV, SARS-CoV, SARS-CoV-2, and variants thereof.

[0025] In certain embodiments, a lipid nanoparticle includes (i) a first chimeric mRNA encoding two or more spike protein S1 subunits each from different coronavirus species or variants, and (ii) a second mRNA encoding an S2 subunit of a coronavirus spike protein and a SPY catcher, wherein the SPY catcher is fused to the N-terminus of the spike protein S2 subunit. In certain non-limiting embodiments, each S1 subunit independently includes a SPY tag fused to the C-terminus of the S1 subunit.

[0026] In certain non-limiting embodiments, the ratio of lipid to mRNA in the disclosed lipid nanoparticles is in the range of about 5:1 to 20:1, inclusive, such as 6:1. The ratio can be a molar ratio. For example, in some certain embodiments, the N:P molar ratio of a lipid nanoparticle and mRNA is 6:1. In certain non-limiting embodiments, the lipid nanoparticle includes at least one ionizable cationic lipid, at least one helper lipid, at least one sterol, at least one PEG-modified lipid, or a combination thereof.

[0027] Suitable ionizable cationic lipids include, without limitation, 1,2-dimyristoyl-sn-glycero-3-ethylphosphocholine (DMEPC), 1,2-di-O-octadecenyl-3-trimethylammonium propane (DOTMA), 1,2-dioleoyl-3-trimethylammonium propane (DOTAP), PNI ionizable lipid, SM-102, DLin-MC3-DMA, DLin-KC2-DMA, ALC-0315, and combinations thereof in various ratios.

[0028] Exemplary helper lipids include, but are not limited to, 1,2-distearoyl-sn-glycero-3-phosphocholine (DSPC), 1,2-di-(9Z-octadecenoyl)-sn-glycero-3-phosphoethanolamine (DOPE), 1-palmitoyl-2-oleoyl-sn-glycero-3-phosphocholin (POPC) and 1,2-dioleoyl-sn-glycero-3-phosphocholine (DOPC).

[0029] Exemplary PEG-modified lipids include, but are not limited to, 1,2-dimyristoyl-racglycero-3-methoxypolyethylene glycol-2000 (PEG-DMG), 1,2-Distearoyl-sn-glycerol, methoxypolyethylene glycol (PEG-DSG), 1,2-Dipalmitoyl-sn-glycerol, methoxypolyethylene glycol (PEG-DPG), mPEG-OH, mPEG-AA (mPEG-CM), mPEG-CH₂CH₂CH₂—NH₂, MPEG-DMG, mPEG-N,N-Ditetradecylacetamide (ALC-0159), mPEG-DSPE, mPEG-DPPE, and combinations thereof in various ratios.

[0030] In certain embodiments, the sterol is cholesterol. In certain non-limiting embodiments, the sterol is a cholesterol-PEG conjugate. In certain non-limiting embodiments, the lipid nanoparticle contains about 20-60% ionizable cationic lipid, about 5-25% helper lipid, about 25-55% sterol, and/or about 0.5-15% PEG-modified lipid.

[0031] Pharmaceutical compositions and vaccines are also described. For example, disclosed is a pharmaceutical composition including a disclosed lipid nanoparticle and a pharmaceutically acceptable carrier or excipient. In certain non-limiting embodiments, a vaccine includes a disclosed lipid nanoparticle or disclosed pharmaceutical composition, optionally in combination with an adjuvant.

[0032] Methods of using the vaccines are provided. In certain non-limiting embodiments, disclosed is a method of inducing in a subject an immune response to a coronavirus, including administering to the subject a disclosed vaccine in an amount effective to generate the immune response. In certain non-limiting embodiments, the immune response is specific to MERS-CoV, SARS-CoV, or SARS-CoV-2. The immune response can include a T cell response and/or a B cell response. In certain non-limiting embodiments, the immune response involves a neutralizing antibody response specific to the coronavirus spike protein. In certain non-limiting embodiments, the immune response inhibits coronavirus infection in the subject. In certain non-limiting embodiments, the immune response inhibits replication of the coronavirus in the subject.

[0033] Vaccination can involve one or more doses or administrations of the vaccines. For example, in certain non-limiting embodiments, the subject is administered a single dose of the vaccine. In certain non-limiting embodiments, the subject is administered two or more doses of the vaccine. The two or more doses can be administered on different days, for example, 14-28 (e.g., 14, 21, or 28) days apart. In certain non-limiting embodiments, each administration of the vaccine provides a dose of about 1 μg, 3 μg, 10 μg, 25 μg, 30 μg, or 100 μg. In certain non-limiting embodiments, the effective amount of the vaccine is a total dose of about 1-500 μg, inclusive.

[0034] The vaccine can be administered by any suitable route, including via intradermal or intramuscular injection, or via oral, intranasal, or intratracheal administration.

[0035] In certain non-limiting embodiments, the subject being vaccinated has been exposed to, is infected with, or is at risk of infection by the coronavirus. In certain non-limiting embodiments, the subject is immunocompromised. In certain non-limiting embodiments, the subject is human.

[0036] Additional advantages of the disclosed method and compositions will be set forth in part in the description which follows, and in part will be understood from the description, or may be learned by practice of the disclosed method and compositions. The advantages of the disclosed method and compositions will be realized and attained by means of the elements and combinations particularly pointed out in the appended claims. It is to be understood that both the foregoing general description and the following detailed description are exemplary and explanatory only and are not restrictive of the disclosure as claimed.

### BRIEF DESCRIPTION OF THE DRAWINGS

[0037] The accompanying drawings, which are incorporated in and constitute a part of this specification, illustrate several embodiments of the disclosed method and compositions and together with the description, explain certain embodiments of the disclosure.

[0038] FIG. 1A is a schematic showing the designs of three spike protein encoding mRNAs incorporated into the LNP-mRNA vaccine candidates. Functional elements are shown in the spike mRNA and translated protein of SARS-CoV-2 WT, B.1.351 and B.1.617 spikes, including protein domains, HexaPro and variant-specific mutations. FIG. 1B is a schematic showing the overall design of the primary experiments. Six-to 8-week-old C57BL/6Ncr mice (B.1.351-LNP-mRNA (top) and B.1.617-LNP-mRNA, n=6 mice per group; WT-LNP-mRNA, n=4 mice; PBS, n=9) received 1 or 10 μg of WT-LNP mRNA, B.1.351-LNP-mRNA or B.1.617-LNP-mRNA via the intramuscular route on day 0 (Prime) and day 21 (Boost). Blood was collected twice, two weeks post prime and boost. The binding and pseudovirus-neutralizing antibody responses induced by LNP-mRNA were evaluated by ELISA and neutralization assay. Mice were euthanized at day 40. The spleen, lymph node and blood samples were collected to analyze immune responses in by flow cytometry, bulk BCR and TCR profiling and single cell profiling. FIGS. 1C-1D are graphs showing serum antibody titers as determined by ELISA of WT-LNP mRNA vaccinated animals (n=4) to spike RBDs (FIG. 1C) and ECDs (FIG. 1D) of SARS-CoV-2 WT, B.1.351 and B.1.617. FIG. 1E is a graph showing serum neutralization titers of WT-LNP mRNA vaccinated animals (n=4) in a cross neutralization of SARS-CoV-2 WT, B.1.351 or B.1.617 pseudovirus infection of ACE2-overexpressed 293T cells. In FIGS. 1C-1E, two-way ANOVA with Tukey's multiple comparisons test was used to assess statistical significance. FIGS. 1F-1I are graphs showing T cell responses in WT-LNP mRNA vaccinated animals (n=4) as measured by intracellular cytokine staining 6 hours after addition of BFA for IFNγ (FIG. 1F), TNFα (FIG. 1G) and IL-2 (FIG. 1H) in CD8⁺ T cells, and IFNγ (FIG. 11) in CD4⁺ T cells. The unpaired parametric t test was used to evaluate statistical significance.

[0039] FIGS. 2A-2F show B.1.351-LNP-mRNA and B.1.617-LNP-mRNA vaccines elicit robust binding and pseudovirus-neutralizing antibody response against all three variants in mice. FIGS. 2A-2B are graphs showing serum antibody binding as determined by ELISA of B.1.351-LNP mRNA vaccinated mice against RBDs (FIG. 2A) and ECDs (FIG. 2B) of SARS-CoV-2 WT, B.1.351 and B.1.617 spikes (n=6). FIG. 2C is a graph showing serum neutralization titers of B.1.351-LNP mRNA vaccinated mice in cross neutralization of SARS-CoV-2 WT, B.1.351 or B.1.617 pseudovirus. FIGS. 2D-2E are graphs showing serum antibody binding as determined by ELISA of B.1.617-LNP mRNA vaccinated mice against RBDs (FIG. 2D) and ECDs (FIG. 2E) of SARS-CoV-2 WT, B.1.351 and B.1.617 spikes.

[0040] FIG. 2F is a graph showing serum neutralization titers of B.1.617-LNP mRNA vaccinated mice in cross neutralization of SARS-CoV-2 WT, B.1.351 or B.1.617 pseudovirus. Data are shown as mean±s.e.m. plus individual data points in dot plots. Statistical significance labels: n.s., not significant; * p<0.05; ** p<0.01; *** p<0.001; **** p<0.0001. FIG. 2G is a graph showing correlation between neutralization activity and ECD binding across various vaccination groups.

[0041] FIGS. 3A-3C are graphs showing percentage of CD8⁺ T cells from B.1.351-LNP-mRNA and B.1.617-LNP-mRNA vaccinated mice expressing IFN-γ (FIG. 3A), TNFα (FIG. 3B), and IL-2 (FIG. 3C) in response to stimulation of S peptide pools (n=3). FIGS. 3D-3E are graphs showing percentage of CD4⁺ T cells from B.1.351-LNP-mRNA and B.1.617-LNP-mRNA vaccinated mice expressing IFN-γ (FIG. 3D) and TNFα (FIG. 3E) in response to stimulation of S peptide pools (n=3). Data are shown as mean±s.e.m. plus individual data points in dot plots. Statistical significance labels: n.s., not significant; * p<0.05; ** p<0.01; *** p<0.001; **** p<0.0001.

[0042] FIG. 4A is a graph of boxplots of cell proportions by clusters for each condition (PBS, n=4; B.1.351-LNP-mRNA, n=6; B.1.617-LNP-mRNA, n=6). FIG. 4B is a graph of boxplots of cell proportions by cell type for each condition (PBS, n=4; B.1.351-LNP-mRNA, n=6; B.1.617-LNP-mRNA, n=6). The high dose (n=3 each) and low dose (n=3 each) groups for each vaccine were merged (n=6 total) in single cell data analysis. Comparison between groups was performed with Wilcoxon ranked sum test.

[0043] FIGS. 5A-5F are bar charts depicting significance values for enriched Gene Ontology biological process terms associated with upregulated genes for B.1.351-LNP-mRNA (FIG. 5A) or B.1.617-LNP-mRNA (FIG. 5B) vs PBS group in B cells, B.1.351-LNP-mRNA (FIG. 5C) or B.1.617-LNP-mRNA (FIG. 5D) vs PBS group in CD4 T cells, and B.1.351-LNP-mRNA (FIG. 5E) or B.1.617-LNP-mRNA (FIG. 5F) vs PBS group in CD8 T cells.

[0044] FIGS. 6A-6B are graph of boxplots showing Chao1 indices for each condition (PBS, n=4; B.1.351-LNP-mRNA, n=6; B.1.617-LNP-mRNA, n=6) for repertoires in the single cell BCR-seq (FIG. 6A) and single cell TCR-seq (FIG. 6B) datasets. FIGS. 6C-6F are graph of boxplots showing Chao1 (FIG. 6C) and Gini-Simpson (FIG. 6D) indices for TRA chain repertoires, and Chao1 (FIG. 6E) and Gini-Simpson (FIG. 6F) indices for TRB chain repertoires in the bulk TCR-seq dataset across vaccination and tissue of origin groups. The low dose and high dose groups of the same vaccine were grouped together.

[0045] FIG. 7A is a schematic illustration of a multivalent coronavirus (CoV) vaccine and experiments to evaluate its efficacy. A mRNA mixture of SARS-CoV-2 delta variant, SARS-CoV, and MERS was encapsulated by lipid nanoparticles and injected to mice (n=9) at day 0 (prime) and day 35 (boost). Blood samples were collected 2 weeks after prime, and 2 weeks, 2 months and 4 months after boost. Mice sera spike binding and neutralizing titers were monitored every 2 months post boost. The SARS-CoV-2 WT mRNA and delta mRNA vaccine were included as two separate control groups. Depending on the titer level after boost, a third vaccine dose can be administered to mice. The T cell response can be evaluated by flowcytometry and BCR and TCR sequencing can be performed on white blood cells from vaccinated mice. FIGS. 7B-7G are graphs showing antibody binding response curves post boost for mice vaccinated with the indicated vaccines. LNP-mRNA vaccines were prepared as described for FIG. 7A. The vaccines used multiplexed mRNA compositions including MERS-CoV either alone or in combination with SARS-CoV or SARS-CoV-2 (Delta) mixed in a 1:1 ratio and packaged into LNP. 3 ug was used for immunization/vaccination, respectively. Animals received prime and boost vaccination 21 days apart. ELISA was performed against SARS-CoV-2, SARS-CoV and MERS-CoV antigens such as RBD or ECD of their spike proteins. Results showed that the defined compositions induced robust antibody responses against the desired targeted viral species. FIGS. 7H-7M are graphs showing antibody binding response curves post boost for mice vaccinated with the indicated vaccines. LNP-mRNA vaccines were prepared as described elsewhere herein, but using the indicated multiplexed mRNA compositions (pan-1 ug/pan-3 ug: pancoronavirus 1 ug/3 ug), where three mRNAs targeting SARS-CoV-2, SARS-CoV and MERS-CoV were mixed in 1:1:1 ratio and packaged into LNP. 1 ug or 3 ug was used for immunization/vaccination. Animals received prime and boost vaccination 21 days apart. ELISA was performed against SARS-CoV-2, SARS-CoV and MERS-CoV antigens such as RBD or ECD of their spike proteins, respectively. Results showed that the pan-1 ug and pan-3 ug vaccines both induced robust antibody responses against all three viral species. FIG. 7N is a graph showing binding antibody titers measured by area under curve of OD450 response to six different spike antigens. The summary titer dot-box plots show the antibody ELISA titers of individual mice in the indicated vaccination groups.

[0046] FIGS. 8A-8B are schematic illustrations of the plasmids used in the SARS-CoV-2 variants vaccine and multivalent CoV mRNA vaccine. The figures illustrates exemplary spike protein encoding mRNAs from three CoV species and four SARS-CoV-2 strains/variants. For each CoV spike, two types of vectors for mRNA transcription (left) and pseudovirus assay (right) can be generated. In certain non-limiting embodiments, the mRNA transcription vector contains 5′ UTR, HexaPro mutations, deleted or substituted Furin cleave site, and 3′ UTR. In the pseudovirus vector, the c-terminal 19 residues can be deleted to increase pseudovirus formation.

[0047] FIG. 9 is a schematic illustration of an exemplary chimeric/hybrid CoV spike mRNA vaccine and experiments to evaluate its efficacy. In certain non-limiting embodiments, the mRNA is designed such that the S1 domain (NTD+RBD) of SARS-CoV, MERS-CoV, SARS-CoV-2 B.1.351 and B.1.617.2 are linked by the SPY tag at their C terminus in one mRNA transcript. In a separate mRNA, a SPY catcher sequence is placed at the N-terminus of the stem S2 of SARS-CoV-2 B.1.617.2 (delta variant). The LNP vaccine includes both mRNAs. After immunization in mice and upon translation, the peptides with SPY tag and SPY catcher are covalently linked and the intact S1-S2 chimeric spike antigen is formed. The immunization schedule and downstream assays for evaluating efficacy are similar to that for the multivalent coronavirus vaccine, including ELISA and neutralization assays, and flow cytometry and sequencing assays.

[0048] FIG. 10 is a schematic illustration of exemplary vectors used in the chimeric/hybrid CoV spike mRNA vaccine. Two types of vectors can be formed, either with or without the SPY conjugation system. The S2 subunit of a strong immunogenic spike can be used as backbone. In certain non-limiting embodiments, the SARS-CoV-2 delta variant S2 is used as the backbone, as illustrated. Without the SPY system, separate chimeric spike constructs are generated and evaluated in animal models (left). In certain non-limiting embodiments, when using the SPY system (right), three S1 subunits can be put in tandem and transcribed from one mRNA transcript. Upon the cleavage of the 2A linker between S1 subunit, each S1 subunit with the SPY tag is conjugated to the S2 subunit fused to the SPY catcher.

[0049] FIG. 11A is a schematic overview of an artificial intelligence (AI) based vaccine design pipeline fed on big data and deep learning. FIG. 11B is a schematic showing exemplary construct designs of several pan-coronavirus vaccine candidates. FIG. 11C is a bar graph showing pilot AAV-CoVacs production assayed by qPCR. FIG. 11D is a bar graph showing functional transduction tests assayed by FACS.

[0050] FIGS. 12A-12D are graphs showing predicted MHC-I scores for the indicated antigens. FIGS. 12E-12G are graphs showing predicted MHC-II scores for the indicated antigens. FIG. 12H is a graph showing percentage hACE2 staining as assayed via the cellular hACE2 system established for antigen testing. FIG. 12I is a graph showing FACS-based quantification of Spike-specific B cell populations performed on the splenocyte samples of the AAV vaccine injected animals in vivo. FIG. 12J is a graph showing FACS-based quantification of vaccine-induced antigen-specific IFNg+CD8 T cell populations in vivo.

[0051] FIGS. 12K-12L are graphs showing FACS-based quantification of IL7RA+ (FIG. 12K) and CD44+IL7RA+CD62L+ (FIG. 12L) T cells in vivo.

[0052] FIGS. 13A-13D illustrate the potent antibody response to Omicron BA.2, BA.2.12.1 and BA.5 subvariants by Omicron BA.2 and Delta bivalent LNP-mRNA. FIG. 13A, Vaccine design of Omicron BA.2 and Delta variant specific LNP-mRNA based on BA.2 and Delta spike mutations. Unique spike mutations on BA.2.12.1 and BA.5 (not included in LNP-mRNA) are colored in orange and magenta. FIG. 13B, Distribution of BA.2 (Yellow), BA.2.12.1 (Cyan) and BA.5 (Red) mutations in one protomer of Omicron spike trimer (PDB: 7T9K). FIG. 13C, Delta and BA.2 specific monovalent or bivalent LNP-mRNA boosters improved antibody response of WT-vaccinated mice to Omicron BA.2, BA.2.12.1 and BA.4/5 subvariants. Comparison of binding antibody titers against BA.2, BA.2.12.1 and BA.4/5 spike RBD and ECD before (D28) and after (D42) receiving 1.5 μg WT, Delta, BA.2 specific monovalent or bivalent (1.5 μg Delta+1.5 μg BA.2) LNP-mRNA boosters. Antibody titers were quantified by area under curves (AUC) of ELISA response curves in FIGS. 14A-14C and 15A-15B. Blood samples were collected in mice immunized with two doses of 1.5 μg WT LNP-mRNA followed by 1.5 μg WT, Delta, BA.2 specific monovalent or Delta & BA.2 bivalent boosters (n=6 in each group). FIG. 13D, Neutralization of Omicron BA.2, BA.2.12.1 and BA.5 pseudovirus by plasma of mice before (D28) and after (D42) vaccinated with WT, Delta, BA.2 specific monovalent or Delta & BA.2 bivalent boosters. Six samples collected on day 0 were included and compared to both D28 and D42 datasets. Titer ratios before and after receiving boosters (D42/D28 ratios) were shown in FIGS. 13C-13D. Individual dot in dot-bar plots represent value from each mouse and are shown as mean±s.e.m . . . . To assess statistical significance, two-way ANOVA with Tukey's or Šídák's multiple comparisons test was used. Statistical significance labels: * p<0.05; ** p<0.01; *** p<0.001; **** p<0.0001. Non-significant comparisons are not shown.

[0053] FIGS. 14A-14C illustrate plasma dilution-dependent ELISA response curves against WT, Delta, BA.2, BA.2.12.1 and BA4/5 spike ECDs. Plasma samples were collected at day 42 (FIG. 14A), day 28 (FIG. 14B) and day 0 (FIG. 14C) from mice immunized with WT Delta, BA.2 specific monovalent or bivalent LNP-mRNA boosters.

[0054] FIGS. 15A-15B illustrate plasma dilution-dependent ELISA response curves against WT, Delta, BA.2, BA.2.12.1 and BA4/5 spike RBDs. Plasma samples were collected at day 42 (FIG. 15A) and day 28 (FIG. 15B) from mice immunized with WT Delta, BA.2 specific monovalent or bivalent LNP-mRNA boosters.

[0055] FIG. 16 is a series of graphs showing a comparison of binding antibody titers against WT (left), Delta (Mid) and BA.2 (Right) spike RBD and ECD before (DO and D28) and after (D42) receiving 1.5 μg WT, Delta, BA.2 specific monovalent or bivalent (1.5 μg Delta+1.5 μg BA.2) LNP-mRNA boosters (n=6). Antibody titers were quantified by area under curves (AUC) of ELISA response curves in FIGS. 14A-14C and 15A-15B. The comparison with day 0 samples and insignificant comparison were not shown.

[0056] FIGS. 17A-17E is a series of graphs illustrating the comparison of ELISA antibody titers of plasma samples collected on day 0, day 28 and day 42. FIGS. 17A-17B, ELISA antibody titers against WT, Delta, BA.2, BA.2.12.1 and BA.4/5 spike RBDs before (D28, FIG. 17B) and after (D42, FIG. 17A) receiving 1.5 μg WT, Delta, BA.2 specific monovalent or bivalent (1.5 μg Delta+1.5 μg BA.2) LNP-mRNA boosters. FIGS. 17C-17E, ELISA antibody titers against WT, Delta, BA.2, BA.2.12.1 and BA.4/5 spike ECDs by plasma samples collected on (D42, FIG. 17C; D28, FIG. 17D; D0, FIG. 17E). Antibody titers were quantified by area under curves (AUC) of ELISA response curves in FIGS. 14A-14C and 15A-15B.

[0057] FIGS. 18A-18B are a series of graph illustrating a correlation of antibody titers against RBD and ECD of five spike antigens in ELISA. Antibody titers against ECD of Omicron BA.2, BA.2.12.1, BA.4/5 subvariants (left) or WT, Delta (right) were shown on y axis as log 10 AUC and plotted against corresponding RBD binding antibody titers on x axis (log 10 AUC). Titers were either shown as mean of matched vaccination group (FIG. 18A) or derived from individual animal (FIG. 18B).

[0058] FIGS. 19A-19C illustrate neutralization titration curves of serially diluted plasma collected at indicated time points from mice vaccinated with WT, Delta, BA.2 monovalent or bivalent LNP-mRNA boosters. FIG. 19A, Neutralization curves of BA.5, BA.2.12.1 and BA.2 pseudovirus by samples collected on day 42 from mice immunized with 1.5 μg WT, Delta, BA.2 monovalent or bivalent LNP-mRNA boosters. FIG. 19B, Neutralization curves of BA.5, BA.2.12.1 and BA.2 pseudovirus by samples collected on day 28 from mice immunized with two doses of 1.5 μg WT LNP-mRNA. FIG. 19C, Neutralization curves of BA.5, BA.2.12.1 and BA.2 pseudovirus by samples collected on day 0 from vaccination naïve mice. The log 10 relative light unit (RLU) measured by NanoLuc luciferase assay were shown as mean±s.e.m. and plotted against serial log 10-transformed sample dilution points.

[0059] FIGS. 20A-20C illustrate the statistical comparison of neutralizing titers of plasma samples from different vaccination groups at same time point (FIG. 20A) or against different Omicron subvariant pseudoviruses at matched time points (FIG. 20B). FIG. 20A, Omicron BA.2 (right), BA.2.12.1 (mid) and BA.5 (left) pseudovirus neutralization by plasma of mice before (D28) and after (D42) vaccinated with WT, Delta, BA.2 specific monovalent or Delta & BA.2 bivalent boosters. Six samples collected on day 0 were included and compared to both D28 and D42 datasets. FIG. 20B, BA.4/5, BA.2.12.1 and BA.2 neutralizing antibody titers from samples collected on day 0 and day 28 (WT×2) were compared. FIG. 20C, BA.4/5, BA.2.12.1 and BA.2 neutralizing antibody titers were compared within same vaccination groups at matched time points including day 28 (pre booster) and day 42 (post booster).

[0060] FIGS. 21A-21B are a series of graphs illustrating the correlation of antibody titers measured by pseudovirus neutralization and ELISA. Antibody titers determined by pseudovirus neutralization assay were shown on x axis as log 10 IC50 and plotted against ELISA binding antibody titers (log 10 AUC) measured by RBD (left) or ECD (right) spike antigens on y axis. Titer values were either derived from mean of matched vaccination group (FIG. 20B) or individual animals (FIG. 20A).

[0061] FIGS. 22A-22F illustrate design and biophysical characterization of Omicron-specific LNP-mRNA vaccine. FIG. 22A, Illustration of mRNA vaccine construct expressing SARS-CoV-2 WT and Omicron spike genes. The spike open reading frame were flanked by 5′ untranslated region (UTR), 3′ UTR and polyA tail. The Omicron mutations (red) and HexaPro mutations (black) were numbered based on WA-1 spike residue number. FIG. 22B, Distribution of Omicron spike mutations (magenta) were displayed in one protomer of spike trimer of which N-terminal domain (NTD), receptor binding domain (RBD), hinge region and S2 were colored in purple, blue, green and orange respectively (PDB: 7SBL). The HexaPro mutations in S2 were colored in cyan. FIG. 22C, Schematics illustrating the formulation and biophysical characterization of lipid nanoparticle (LNP)-mRNA. FIG. 22D, Dynamic light scattering derived histogram depicting the particle radius distribution of Omicron spike LNP-mRNA. FIG. 22E, Omicron LNP-mRNA image collected on transmission electron microscope. FIG. 22F, human ACE2 receptor binding of LNP-mRNA encoding Omicron spike expressed in 293T cells as detected by human ACE2-Fc fusion protein and PE-anti-human Fc antibody on Flow cytometry.

[0062] FIGS. 23A-23E illustrate that an omicron-specific LNP-mRNA vaccine elicited neutralizing antibodies against SARS-CoV-2 Omicron variant. FIG. 23A, Immunization and sample collection schedule. Retro-orbital blood were collected prior Omicron LNP-mRNA vaccination on day 0, day 13 and day 21. Ten mice (n=10) were intramuscularly injected with 10 μg Omicron LNP-mRNA on day 0 (prime, Omicron×1) and day 14 (boost, Omicron×2). The plasma and peripheral blood mononuclear cells (PBMCs) were separated from blood for downstream assays. The slight offset of the labels reflects the fact that each of the blood collections were perform prior to the vaccination injections. Data were collected from two independent experiments and each experiment has five mice. FIG. 23B, Binding antibody titers of plasma from mice vaccinated with Omicron LNP-mRNA against Omicron spike RBD as quantified by area under curve of log₁₀-transformed titration curve (Log₁₀ AUC) in FIG. 26. Each dot in bar graphs represents value from one mouse (n=10 mice). FIG. 23C, Neutralization of Omicron pseudovirus by plasma from Omicron LNP-mRNA vaccinated mice. FIG. 23D, Omicron live virus titration curves over serial dilution points of plasma from mice before and after immunization with Omicron LNP-mRNA at defined time points. Data of each sample were collected from three replicates (n=10 mice). FIG. 23E, Neutralization of Omicron infectious virus by plasma from Omicron LNP-mRNA vaccinated mice (n=10 mice). Data on dot-bar plots are shown as mean #s.e.m. with individual data points in plots. One-way ANOVA with Dunnett's multiple comparisons test was used to assess statistical significance. Statistical significance labels: * p<0.05; ** p<0.01; *** p<0.001; **** p<0.0001.

[0063] FIGS. 24A-24D illustrate the use of a heterologous booster with Omicron LNP-mRNA as compared to homologous booster with WT LNP-mRNA in mice that previously received a two-dose WT LNP-mRNA vaccination. FIG. 24A, Schematics showing the immunization and blood sampling schedule of mice administered with 1 μg WT LNP-mRNA prime (WT×1) and boost (WT×2) as well as 10 μg WT or Omicron-specific LNP-mRNA booster shots. The data was collected and combined from two independent experiments shown in FIGS. 27A-27D and 28A-28D. FIG. 24B, Bar graph comparing binding antibody titers of mice administered with PBS or WT and Omicron LNP-mRNA against Omicron, Delta and WA-1 RBD (ELISA antigens). The antibody titers were quantified as Log₁₀ AUC based on titration curves in FIGS. 26A-26B. PBS sub-groups (n=6 each) collected from different matched time points showed no statistical differences between each other, and were combined as one group (n=18). FIG. 24C, Pseudovirus neutralizing antibody titers in the form of log₁₀-transformed reciprocal IC50 calculated from fitting the titration curve with a logistic regression model (n=12 mice before booster, n=5 in WT×3, n=7 in WT×2+Omicron). FIG. 24D, Infectious virus neutralization titer comparisons between mice before and after vaccination with WT or Omicron boosters (n=9 mice before booster, n=5 in WT×3, n=4 in WT×2+Omicron). Titer ratios were indicated in each graph and fold change described in manuscript is calculated from (ratio-1). Data on dot-bar plots are shown as mean±s.e.m. with individual data points in plots. Two-way ANOVA with Tukey's multiple comparisons test was used to assess statistical significance. Statistical significance labels: * p<0.05; ** p<0.01; *** p<0.001; **** p<0.0001. Non-significant comparisons are not shown, unless otherwise noted as n.s., not significant. Sample number is designated as n from biologically independent samples.

[0064] FIGS. 25A-25F illustrate cross reactivity and targeting sites characterization of plasma antibodies elicited by Omicron and WT LNP-mRNAs against SARS-CoV-2 VoCs and Betacoronavirus species. FIG. 25A, cross reactivity of plasma antibody from mice immunized with Omicron LNP mRNA (prime and boost) to SARS-CoV-2 VoCs and pathogenic coronavirus species (n=10 mice). FIG. 25B, cross reactivity of plasma antibody from mice immunized with WT (WT×3) or Omicron (WT×2+Omicron) boosters to SARS-CoV-2 beta variant and pathogenic coronavirus species (n=6 mice in PBS, n=5 in WT×3, n=7 in WT×2+Omicron). FIG. 25C, representative antibodies from major classes of RBD epitopes were shown by aligning spike RBDs in each of complex structures. The Omicron RBD surface was set to semi-transparent to visualize 15 RBD mutations and their relative positions to antibody epitopes. FIG. 25D, baseline titers of plasma from mice of different vaccination status (WT×3, WT×2+Omicron, Omicron×2) were shown as log₁₀ AUC determined in hACE2 and antibody competition ELISA. Each group sample number is denoted with n (n=10 in Omicron×2, n=5 in WT×3, n=7 in WT×2+Omicron) in two independent assays (hACE2 and antibody competition ELISA). FIG. 25E, significant portion of plasma antibody from mice receiving Omicron (Omicron×2, left panel) or WT+Omicron (WT×3 middle, or WT×2+Omicron, right panel) LNP-mRNA competed with hACE2 for Omicron RBD binding in ELISA (n=10 in Omicron×2, n=5 in WT×3, n=7 in WT×2+Omicron). FIG. 25F, plasma antibody from mice receiving Omicron (Omicron×2, n=10, left panel) or WT+Omicron (WT×3, n=5, middle or WT×2+Omicron, n=7, right panel) LNP-mRNA showed various extent of binding reduction in the presence of blocking antibodies with known epitopes on RBD. The error bar and statistical information are identical with FIG. 24 and described in method section.

[0065] FIGS. 26A-25B illustrate ELISA and neutralization titration curves over serial dilution of plasma collected at different timepoints from mice administered with PBS or WT and/or Omicron LNP-mRNA. FIG. 26A, ELISA titration curves over serial log 10-transformed dilution points of plasma collected from mice before and after immunization with Omicron LNP-mRNA at defined time points (n=10). Average curves, data are shown as mean±s.e.m. FIG. 26B, Omicron pseudovirus titration curves over serial log 10-transformed dilution points of plasma collected from mice before and after immunization with Omicron LNP-mRNA at defined time points (n=10). Left panel, average curves, data are shown as mean±s.e.m.; Right panel, individual curves.

[0066] FIGS. 27A-27D illustrate both WT and Omicron specific LNP-mRNA booster shots greatly improved waning immunity of mice vaccinated with SARS-CoV-2 WT LNP-mRNA against SARS-CoV-2 Delta and Omicron variants (Independent experiment 1 or batch 1).

[0067] FIG. 27A, Schematics showing the immunization and blood sampling schedule of mice administered with 1 μg WT LNP-mRNA prime (WT×1) and boost (WT×2) as well as 10 μg WT or Omicron-specific LNP-mRNA booster shots. The plasma and PBMCs were separate from blood for downstream assays. FIG. 27B, Bar graph comparing binding antibody titers of mice administered with PBS or WT and Omicron LNP-mRNA against Omicron, Delta and WT RBD (ELISA antigens). The antibody titers were quantified as Log₁₀ AUC based on titrations curves in FIG. 26A. PBS sub-groups (n=3 each) collected from different matched time points showed no statistical differences between each other, and were combined as one group (n=9). FIG. 27C, Neutralizing antibody titers in the form of log₁₀-transformed reciprocal IC50 calculated from fitting the titration curve with a logistic regression model (n=3). FIG. 27D, Correlation of neutralization titers (log₁₀ reciprocal IC50, y axis) and ELISA titers (log₁₀ AUC, x axis) from matched vaccination group (left panel) or individual mouse (right panel). PBS samples from different timepoints were shown as one group in correlation map and were not included in linear regression model. Each dot in bar graphs represents value from one group average (left panel), or one individual mouse (right panel). Titer ratios were indicated in each graph and fold change is calculated from (ratio-1). Data on dot-bar plots are shown as mean±s.e.m. with individual data points in plots. Two-way ANOVA with Tukey's multiple comparisons test was used to assess statistical significance. Statistical significance labels: * p<0.05; ** p<0.01; *** p<0.001; **** p<0.0001. Non-significant comparisons are not shown, unless otherwise noted as n.s., not significant.

[0068] FIGS. 28A-28D illustrate that omicron specific LNP-mRNA booster shots greatly improved waning immunity of mice vaccinated with SARS-CoV-2 WT LNP-mRNA against SARS-CoV-2 Delta and Omicron variants (Independent experiment 2 or batch 2). FIG. 28A, Schematics showing the immunization and blood sampling schedule of mice administered with 1 μg WT LNP-mRNA prime (WT×1) and boost (WT×2) as well as 10 μg Omicron-specific LNP-mRNA booster shots. The plasma and PBMCs were separate from blood for downstream assays. FIG. 28B, Bar graph comparing binding antibody titers of mice administered with PBS or WT and Omicron LNP-mRNA against Omicron, Delta and WT RBD (ELISA antigens). The antibody titers were quantified as Log 10 AUC based on titrations curves in FIG. 26A. PBS sub-groups (n=3 each) collected from different matched time points showed no statistical differences between each other, and were combined as one group (n=6). FIG. 28C, Neutralizing antibody titers in the form of log 10-transformed reciprocal IC50 calculated from fitting the titration curve with a logistic regression model (n=9 before booster, n=5 in WT×3, n=4 in WT×2+Omicron). FIG. 28D, Correlation of neutralization titers (log 10 reciprocal IC50, y axis) and ELISA titers (log 10 AUC, x axis) from matched vaccination group (left panel) or individual mouse (right panel). PBS samples from different timepoints were shown as one group in correlation map and were not included in linear regression model. Each dot in bar graphs represents value from one group average (left panel), or one individual mouse (right panel). Titer ratios were indicated in each graph and fold change is calculated from (ratio-1). Data on dot-bar plots are shown as mean±s.e.m. with individual data points in plots. Two-way ANOVA with Tukey's multiple comparisons test was used to assess statistical significance. Statistical significance labels: * p<0.05; ** p<0.01; *** p<0.001; **** p<0.0001. Non-significant comparisons are not shown, unless otherwise noted as n.s., not significant.

[0069] FIGS. 29A-29B illustrate ELISA titration curves over serial dilution of plasma collected at different timepoints from mice administered with PBS or WT and/or Omicron LNP-mRNA. FIG. 29A, ELISA titration curves of batch 1 experiment (n=3). FIG. 29B. ELISA titration curves of batch 2 experiment (n=9 before booster, n=5 in WT×3, n=4 in WT×2+Omicron). The OD450 values were plotted against a series of log 10-transformed dilution points of plasma from mice 35 days post WT prime, >4 months post WT prime (day 127 in batch 1 and day 166 in batch 2) and 2 weeks post booster (day 140 in batch 1 and day 180 in batch 2) of WT or Omicron LNP-mRNA, against spike receptor binding domain (RBD) antigens of Omicron variant (left), Delta (mid) and WT (right) were shown. Data are shown as mean±s.e.m. in plots.

[0070] FIG. 30 illustrates binding antibody titers of mice administered with PBS or WT and Omicron LNP-mRNA against Omicron, Delta and WT RBD (ELISA antigens), were grouped by vaccination timepoints to compare titers against different RBD antigens. The antibody titers were quantified as area under curve of log 10-transformed titration curve (Log 10 AUC). The data were derived from independent experiment 1 and 2.

[0071] FIGS. 31A-31E illustrate Omicron, Delta, and WT pseudovirus production, characterization, and neutralization assay. FIG. 31A. Functional titration curves of Omicron, Delta, and WA-1 pseudoviruses in hACE2+ cells. FIG. 31B. Representative Flow Cytometry plots of infectivity of Omicron, Delta, and WA-1 pseudoviruses in hACE2+ cells. FIG. 31C. Quantification of infectivity of Omicron, Delta, and WT pseudoviruses in hACE2+ cells (n=4). FIG. 31D, Neutralization titration curves from batch 1 experiment (n=3). FIG. 31E. Neutralization titration curves from batch 2 experiment (n=9 before booster, n=5 in WT×3, n=4 in WT×2+Omicron). Percent of pseudovirus infected cells was plotted over serial dilutions of plasma from mice 35 days post WT prime, >4 months post WT prime (day 127 in batch 1 and day 166 in batch 2) and 2 weeks post booster (day 140 in batch 1 and day 180 in batch 2) of WT and Omicron LNP-mRNA against Omicron (left), Delta (mid) and WT (right) pseudovirus. Pseudovirus infection rate was calculated from percent of GFP positive cells and was plotted against plasma dilution (log 10 transformed) as titration curve. Top panels, average curves, data are shown as mean±s.e.m.; Bottom panels, individual curves. Sample number is designated as n from biologically independent samples. One-way ANOVA with Holm-Sidak multiple comparisons test was used to assess statistical significance. Statistical significance labels: * p<0.05; ** p<0.01; *** p<0.001; **** p<0.0001.

[0072] FIGS. 32A-32B illustrate neutralizing antibody titers in the form of log 10-transformed reciprocal IC50 were grouped by vaccination timepoints to compare titers against different pseudoviruses. The neutralization titers from combined datasets (FIG. 32A) or batch 1 (FIG. 32B) were quantified as log 10-transformed reciprocal IC50 values (Log 10 reciprocal IC50, or Log 10 IC50) based on titration curves in FIG. 31. Titer ratios were indicated in each graph and fold change is calculated from (ratio-1). Data on dot-bar plots are shown as mean±s.e.m. with individual data points in plots. Two-way ANOVA with Tukey's multiple comparisons test was used to assess statistical significance. Statistical significance labels: * p<0.05; ** p<0.01; *** p<0.001; **** p<0.0001. Non-significant comparisons are not shown, unless otherwise noted as n.s., not significant.

[0073] FIGS. 33A-33B illustrate live virus neutralization titration curves over serial dilution of plasma collected at different timepoints from mice administered with PBS or WT and/or Omicron LNP-mRNA. FIG. 33A, Omicron live virus titration curves (n=9 before booster, n=5 in WT×3, n=4 in WT×2+Omicron). FIG. 33B. Delta live virus titration curves (n=9 before booster, n=5 in WT×3, n=4 in WT×2+Omicron). Titration curves were plotted over serial dilution points of plasma collected from mice before and after WT or Omicron LNP-mRNA boosters at defined time points. Data of each sample were collected from two replicates. Data are shown as mean±s.e.m. in plots.

[0074] FIGS. 34A-34C illustrate a Correlation analysis of antibody titers determined by ELISA, pseudovirus neutralization and live virus neutralization assays. FIG. 34A, Correlation between pseudovirus neutralization titers (log 10 reciprocal IC50, y axis) and ELISA titers (log 10 AUC, x axis) from matched vaccination group (left panel) or individual mouse (right panel). FIG. 34B. Correlation between live virus neutralization titers (log 10 IC50, x axis) and ELISA titers (log 10 AUC, y axis) from matched vaccination group (left panel) or individual mouse (right panel). FIG. 34C. Correlation between live virus neutralization titers (log 10 IC50, x axis) and pseudovirus neutralization titers (log 10 AUC, y axis) from matched vaccination group (left panel) or individual mouse (right panel). PBS samples from different timepoints were shown as one group in correlation map and were not included in linear regression model. Each dot in bar graphs represents value from one group average (left panel), or one individual mouse (right panel). The Prism default two-side simple linear regression test without multiple comparison adjustment was used to assess statistical significance.

[0075] FIGS. 35A-35C illustrate an assessment of WT or Omicron LNP-mRNA mediated cross reactivity against a panel of SARS-CoV-2 variants and pathogenic coronavirus species in ELISA. FIG. 35A, binding antibody titers (Log 10 AUC) of plasma from mice that received Omicron LNP-mRNA prime and boost (Omicron×2, n=10). FIG. 35B, binding antibody titers of plasma from mice that received WT (WT×3, n=5) or Omicron (WT×2+Omicron, n=7) LNP-mRNA boosters. FIG. 35C, binding antibody titers of plasma from mice that received Omicron LNP-mRNA prime+boost (Omicron×2, n=10), WT (WT×3, n=5) or Omicron (WT×2+Omicron, n=7) LNP-mRNA boosters. This figure is a combination of data from the experiment shown in FIGS. 22A-22F and 24A-24D for comparison clarity. Data on dot-bar plots are shown as mean±s.e.m. with individual data points in plots. Two-way ANOVA with Tukey's multiple comparisons test was used to assess statistical significance. Multiple comparisons between titers against different ELISA antigens were made within same vaccination group. All comparisons with MERS RBD were significant and not shown in graph to simplify comparisons. Statistical significance labels: * p<0.05; ** p<0.01; *** p<0.001; **** p<0.0001. Non-significant comparisons are not shown.

[0076] FIGS. 36A-36C illustrate competition ELISA titration curves and binding antibody titers against low-density Omicron RBD from mice vaccinated with WT and/or Omicron LNP-mRNA. FIG. 36A. hACE competition ELISA titration curves over a series of log 10-transformed dilution points of plasma from mice vaccinated with Omicron LNP-mRNA (Omicron×2 plasma, left, n=10) or WT/Omicron LNP-mRNA (WT×3, middle, n=5 and WT×2+Omicron plasma, right, n=7). FIG. 36B. antibody competition ELISA titration curves over a series of log 10-transformed dilution points of plasma from mice vaccinated with Omicron LNP-mRNA (Omicron×2 plasma, left, n=10) or WT/Omicron LNP-mRNA (WT×3 plasma, middle, n=5 and WT×2+Omicron plasma, right, n=7). FIG. 36C. PBS buffer as negative control to show minimal cross reactivity of anti-mouse secondary antibody with human IgG blocking antibodies, including Clone 13A, CR3022 and S309. n=2 and each contains 8 mock dilution points.

[0077] FIG. 37 is a representative flow cytometry gating strategy for detecting Omicron spike binding to human ACE2 receptor.

[0078] FIGS. 38A-38I illustrate antibody responses induced by Triplex LNP-mRNA vaccination against SARS-CoV-2 Delta, SARS-CoV and MERS-CoV in vivo. FIG. 38A, Schematics of mRNA vaccine construct design against pathogenic human coronavirus species. Each construct has regulatory elements (5′UTR, 3′UTR and polyA) and spike ORF. The domain structures as well as engineered mutations of translated spike proteins of SARS-CoV-2 Delta variant (Delta), SARS-CoV (SARS) and MERS-CoV (MERS). FIG. 38B, Engineered mutations in spike protein structures of SARS-CoV-2 Delta, SARS-CoV and MERS-CoV. The N-terminal domain (NTD, blue), receptor binding domain (RBD, green) and S2 subunit (orange) of one protomer along with homologous HexaPro mutations (pink) and Delta variant mutations (red) were highlighted in the spike trimer structures. FIG. 38C, Schematics of characterization of LNP-mRNA vaccine formulations. Assembly procedure of LNP-mRNA vaccine on NanoAssemblr Ignite and downstream biophysical characterization assays. FIG. 38D, Histogram displaying radius distribution of LNP-mRNA formulations of SARS-CoV-2 Delta and a Triplex (Delta+SARS+MERS) (abbreviated as Triplex-CoV or MixCoV), measured by dynamic light scattering (DLS). The polydispersity index and mean radius of each LNP sample were shown at top left corner. FIG. 38E, Transmission electron microscope (TEM) images of Delta and Triplex-CoV LNP-mRNAs. FIG. 38F, Schematics of vaccination schedule of the Triplex LNP-mRNA formulations, as well as downstream assays to evaluate the antibody responses and other immunological profiles. FIG. 38G, Binding antibody titers of plasma samples from mice administered with PBS or different LNP-mRNAs (n=9 mice from one independent experiment) against RBD or ectodomain (ECD) of SARS-CoV-2 wild type (WT, Wuhan/WA-1), Delta variant, SARS and MERS spikes. The binding antibody titers were quantified by area under curve of log 10-transformed titration curve (log 10 AUC) in FIGS. 44A-44D. The mice were intramuscularly injected with two doses (×2, 2 weeks apart) of PBS, 1 μg SARS-CoV-2 Delta variant LNP-mRNA (delta), 1 μg or 3 μg equal mass mixture of Delta, SARS and MERS LNP-mRNA (Triplex-CoV). FIG. 38H, Overall heatmap of antibody titers of individual mice (one column represents one mouse, n=9) against eight spike antigens in ELISA (one row represents one antigen). FIG. 38I, Correlation of antibody titers against RBD (y value) and ECD (x value) of same coronavirus spike, by individual mouse, or by averaged group (n=9 mice×4 antigens). In the dot-box plots of this figure, each dot represents data from one mouse. Data are shown as mean±s.e.m. plus individual data points in plots. Two-way ANOVA with Tukey's multiple comparisons test was used to assess statistical significance. Statistical significance labels: * p<0.05; ** p<0.01; *** p<0.001; **** p<0.0001. Non-significant comparisons are not shown, unless otherwise noted as n.s., not significant.

[0079] FIGS. 39A-39E illustrate neutralizing antibody responses induced by Triplex LNP-mRNA vaccination against SARS-CoV-2 Delta, SARS-CoV and MERS-CoV in vivo. FIG. 39A, Neutralization titration curves of plasma from mice treated with PBS, Delta, Triplex-CoV LNP-mRNA against WT and Delta SARS-CoV-2, SARS-CoV and MERS-CoV pseudoviruses. The percent of GFP positive cells reflected the infection rate of host cells by pseudovirus and was plotted against the dilution factors of mice plasma to quantify neutralizing antibody titers. FIG. 39B, Neutralizing antibody titers in the form of reciprocal IC50 derived from fitting the titration curves with a logistic regression model. Each dot represents data from one mouse and each group contains nine mice (n=9, one independent experiment). FIG. 39C, Neutralization assay using authentic virus in BL3 setting. Neutralization curves and titer quantification dot plots (n=9). FIG. 39D. Correlation of neutralization log 10 IC50 vs. antibody titers against ECD of same coronavirus spike, by individual mouse, or by averaged group (n=9 mice×4 antigens). FIG. 39E, Correlation between BL3 authentic virus neutralization and BL2 pseudovirus neutralization, and between BL3 authentic virus neutralization and ELISA, by individual mouse (n-9 mice×1 antigens). In the dot-box plots of this figure, each dot represents data from one mouse. Data are shown as mean #s.e.m. plus individual data points in plots. Two-way ANOVA with Tukey's multiple comparisons test was used to assess statistical significance. Statistical significance labels: * p<0.05; ** p<0.01; *** p<0.001; **** p<0.0001. Non-significant comparisons are not shown, unless otherwise noted as n.s., not significant.

[0080] FIGS. 40A-40G illustrate in vivo antibody responses induced by Duplex LNP-mRNA vaccination against MERS-CoV, in combination with SARS-CoV-2 Delta or SARS-CoV. FIG. 40A, Schematics of vaccination schedule of the MERS Singlet and Duplex combo LNP-mRNA formulations, as well as downstream assays to evaluate the antibody responses and other immunological profiles. Two Duplexes were evaluated, (MERS+SARS) or (MERS+SARS2 Delta). FIG. 40B, Dot-box plots summarizing binding antibody titers of plasma from mice administered with PBS or different LNP-mRNAs (n=3 mice, one independent experiment) against RBD or ECD of SARS-CoV-2 WT/WA-1 and Delta variant, as well as SARS and MERS spikes. FIG. 40C, Heatmap of antibody titers of individual mice (one column represents one mouse, n=3) against eight spike antigens in ELISA (one row represents one antigen FIG. 40D, Correlation of antibody titers against RBD (y value) and ECD (x value) of same coronavirus spike, by individual mouse, or by averaged group (n=3 ×4 antigens). FIG. 40E, Neutralization titration curves of plasma from mice treated with PBS control, or LNP-mRNA formulations with MERS alone or in Duplexes (MERS+SARS) or (MERS+SARS2 Delta); all tested against WT/WA-1 and Delta SARS-CoV-2, SARS-CoV and MERS-CoV pseudoviruses. The percent of GFP positive cells reflected the infection rate of host cells by pseudovirus and was plotted against the dilution factors of mice plasma to quantify neutralizing antibody titers (n=3). FIG. 40F, Neutralizing antibody titers in the form of reciprocal IC50 derived from fitting the titration curves with a logistic regression model. Each dot represents data from one mouse and each group contains three mice (n=3). FIG. 40G, Correlation of neutralization IC50 vs. antibody titers against ECD of same coronavirus spike, by individual mouse, or by averaged group (n=3×4 antigens). In the dot-box plots of this figure, each dot represents data from one mouse. Data are shown as mean±s.e.m. plus individual data points in plots. Two-way ANOVA with Tukey's multiple comparisons test was used to assess statistical significance. Statistical significance labels: * p<0.05; ** p<0.01; *** p<0.001; **** p<0.0001. Non-significant comparisons are not shown, unless otherwise noted as n.s., not significant.

[0081] FIGS. 41A-41E illustrate single cell transcriptomics of animals vaccinated by multiplexed LNP-mRNA vaccine against SARS-CoV-2, SARS-CoV and MERS-CoV in mice. FIG. 41A UMAP visualization of all 91,526 cells pooled across samples and conditions. All identified clusters are shown with cell identities assigned, based on the expression of cell type specific markers. FIG. 41B UMAP visualization, colored by vaccination groups. PBS, Delta, mixCoV-lo (i.e. Triplex 1 μg) and mixCoV-hi (i.e. Triplex 3 μg). n=3 mice, one independent experiment. FIG. 41C Heatmap showing the population clusters with distinct expression patterns. Rows represent the scaled expression of the top 10 genes that were differentially expressed in each cluster, relative to all other cells, based on Wilcoxon rank sum analysis. FIG. 41D Stacked bar plot depicting the proportion of different immune populations for each vaccination group. FIG. 41E Dot-whisker plot of immune cell proportions by cell type for each vaccination group: PBS, Delta, mixCoV-lo and mixCoV-hi; n=3 mice each group. Statistical differences were assessed by two-way ANOVA with Tukey's correction for multiple testing. Statistical significance labels: * p<0.05; ** p<0.01; *** p<0.001; **** p<0.0001. Non-significant comparisons are not shown, unless otherwise noted as n.s., not significant.

[0082] FIGS. 42A-42E illustrate direct comparison of sequential vs. mixture vaccination schedules against SARS-CoV-2 Delta, MERS-CoV, and SARS-CoV. FIG. 42A Schematics of sequential vs. mixture vaccination schedules and sampling. In the Sequential vaccination schedule, vaccinations of SARS-CoV-2 Delta, MERS-CoV, and SARS-CoV were given in sequence separated by 3 weeks, each with 1 μg LNP-mRNA prime and 1 μg LNP-mRNA boost 3 weeks apart. In the Mixture vaccination schedule, vaccinations of SARS-CoV-2 Delta, MERS-CoV, and SARS-CoV were given simultaneously, each at 1 μg LNP-mRNA (3 μg total) for both prime and boost. The first dose and the blood sample harvest were done at the same day for both sequential and mixture schedules for comparison. FIG. 42B Dot-box plots summarizing binding antibody titers of plasma from mice administered with PBS, Sequential or Mixture LNP-mRNA vaccinations (n=4 mice, one independent experiment) against RBD or ECD of SARS-CoV-2 WT/WA-1 and Delta variant, as well as SARS and MERS spikes. FIG. 42C Neutralization titration curves of plasma from mice treated with PBS, Sequential or Mixture LNP-mRNA vaccinations (n=4 each, one independent experiment); all tested against WT/WA-1 and Delta SARS-CoV-2, SARS-CoV and MERS-CoV pseudoviruses. The percent of GFP positive cells reflected the infection rate of host cells by pseudovirus and was plotted against the dilution factors of mice plasma to quantify neutralizing antibody titers. FIG. 42D Neutralizing antibody titers in the form of reciprocal IC50 derived from fitting the titration curves with a logistic regression model. Each dot represents data from one mouse and each group contains three mice (n=4). FIG. 42E Blocking ELISA antibody titers of plasma from different vaccination groups against Delta (left), SARS (mid), MERS (right) ECDs in the presence of competing reagents including PBS (negative control), Delta, SARS or MERS ECDs. Statistical significance was analyzed between groups of different blockers (n=4, one independent experiment). In the dot-box plots of this figure, each dot represents data from one mouse. Data are shown as mean±s.e.m. plus individual data points in plots. Two-way ANOVA with Tukey's multiple comparisons test was used to assess statistical significance. Statistical significance labels: * p<0.05; ** p<0.01; *** p<0.001; **** p<0.0001. Non-significant comparisons are not shown, unless otherwise noted as n.s., not significant.

[0083] FIGS. 43A-43D illustrate sequence alignment, functional validation and ELISA titration curves for engineered mRNA-encoded spike proteins of three pathogenic human coronavirus species. FIG. 43A Sequence alignment of spikes of SARS-CoV-2 Delta variant, SARS-CoV and MERS-CoV used in the LNP-mRNA vaccine. The full-length spike sequences of these three pathogenic human coronavirus species were aligned and their degree of identity at each residue was color coded by a gradient blue color. FIGS. 43B-43C) Surface expression of functional spike proteins in 293T cells after electroporation of corresponding mRNA, as detected by human ACE2 (FIG. 43B) or human DPP4 (FIG. 43C) Fc fusion protein bound to PE anti-Fc antibody. FIGS. 43D-43E ELISA titration curves over serial log 10-transformed dilution points of plasma samples from mice treated with spike antigens of SARS2 WT/WA1, SARS2 Delta, SARS and MERS. RBD and ECD ELISA spike antigens were used to evaluate the potency of binding antibodies induced by LNP-mRNA vaccines (top and bottom four panels, respectively). The mice were intramuscularly injected with two doses (×2, 2 weeks apart) of the following: (FIG. 43D) PBS, 1 μg SARS-CoV-2 Delta variant LNP-mRNA (delta), 1 μg or 3 μg equal mass mixtures (Delta, SARS and MERS mRNA) delivered by LNP (Triplex-CoV); (FIG. 43E) PBS, 3 μg MERS LNP-mRNA, 3 μg equal mass mixture of MERS mRNA in combination with SARS or Delta mRNA delivered by LNP (Comb).

[0084] FIGS. 44A-44D illustrate single cell transcriptomics visualization, clustering and cell type identification. (FIG. 44A) UMAP visualization, colored by the scaled expression of representative cell type-specific markers in T cells, NK cells, myeloid cells, B cells, and plasma cells. (FIG. 44B) Bubble plots showing cell population clusters and their respective feature markers. (FIG. 44C) UMAP clustering, color-coded by major immune cell populations. (FIG. 44D) UMAP visualizations of sub-clustering, performed in pooled B cells, plasma cells, myeloid cells, and activated CD4 T cells. Cell subclusters were identified as the indicated immune populations using the markers presented in the main Figures.

[0085] FIGS. 45A-45B illustrate additional pathway analysis of differentially expressed genes compared between vaccination groups in different cell types in the single cell RNA-seq data. (FIG. 45A) Bubble plots of overall biological process pathways of differentially expressed genes compared between vaccination groups in different cell types. Each dot is a pathway presented with a color and size that represent the respective log fold change and −log 10 adjusted p value, while the dot position compares the activation score (mean expression log fold change of pathway genes) in the analysis of mixCoV-vs-PBS (y axis), relative to the Delta-vs-PBS (x-axis). (FIG. 45B) Network plots of enriched pathways of differentially expressed genes between the vaccination groups and PBS, in different cell types. Each dot is a pathway with the size and color representing the −log 10 adjusted p value and the pathway cluster, respectively. Clusters are labeled with the most significantly enriched member pathway (meta-pathway). Colored representative meta-pathway clusters correspond to the colored text boxes.

[0086] FIGS. 46A-46C illustrate differential expression, pathway signature and gene set cluster analyses of single cell transcriptomics for animals vaccinated by multiplexed LNP-mRNAs. (FIG. 46A) Square plots compare differential expression (DE) of mixCoV-vs-PBS (y axis) to Delta-vs-PBS (x axis) analyses (n=3, one independent experiment). Each gene is presented by a dot, positioned by the log 2 (x+1) fold change in either DE analysis and sized by the −log 10 FDR-adjusted p value. Genes that are upregulated or down regulated in mixCoV-vs-PBS are shown as red or blue dots, respectively. Analyses were done for B cell, CD4 T cell and CD8 T cell populations. (FIG. 46B) Ridge density plots showing the expression log fold change meta-pathway genes between different vaccination groups in different cell types. Each plot presents the top five meta-pathways in either mixCoV-vs-PBS analysis, and only differentially expressed genes of either analysis were selected for each meta-pathway ridgeplot. (FIG. 46C) Heatmaps of differentially expressed genes between different vaccination groups of representative pathways in different cell types.

[0087] FIGS. 47A-47D illustrate analyses of antibody responses induced by sequential and Triplex LNP-mRNA vaccinations. (FIGS. 47A-47B) ELISA OD450 titration curves over serial log 10-transformed dilution points of plasma from mice treated with PBS, sequential or mixture LNP-mRNA vaccinations. ELISA antibody titers are against RBDs or ECDs of SARS2 WT/WA1, SARS2 Delta, SARS and MERS. The Sequential vaccination mice were intramuscularly injected with two doses (×2, 3 weeks between prime and boost) of 1 μg SARS-CoV-2 Delta, MERS, SARS LNP-mRNA, three weeks apart, in this sequence (Sequential Delta-MERS-SARS). The Mixture vaccination mice were intramuscularly injected with two doses (3 weeks between prime and boost) 3 μg equal mass mixture (1 μg each) of Delta, SARS and MERS LNP-mRNA (Mixture Delta/MERS/SARS). (FIGS. 47C-47D) Comparative analyses of antibody responses induced by Triplex LNP-mRNA vaccination against SARS-CoV-2 Delta, SARS-CoV and MERS-CoV in vivo. ELISA antibody titers are against (FIG. 47C) RBDs or (FIG. 47D) ECDs of SARS2 WT/WA1, SARS2 Delta, SARS and MERS.

[0088] FIGS. 48A-48D illustrate a correlation analysis of neutralization datasets; Blocking ELISA titration curves. (FIG. 48A) Heatmap of antibody titers of individual mice (one column represents one mouse) against eight spike antigens in ELISA (one row represents one antigen). (FIG. 48B) Correlation of antibody titers against RBD (y value) and ECD (x value) of same coronavirus spike, by individual mouse, or by averaged group. (FIG. 48C) Correlation of neutralization IC50 vs. antibody titers against ECD of same coronavirus spike, by individual mouse, or by averaged group.

[0089] (FIG. 48D) Blocking ELISA titration curve in response to the Delta, SARS or MERS ECD antigen in the presence of various competing agents or blockers: PBS, Delta ECD, SARS ECD and MERS ECD.

[0090] FIGS. 49A-49B illustrate blocking ELISA antibody titers of plasma from different vaccination groups. (FIG. 49A) Blocking ELISA antibody titers against Delta, SARS, and MERS ECDs in the presence of competing reagents including PBS (negative control), Delta, SARS or MERS ECDs. Statistical significance was analyzed between different vaccination groups in the presence of the same blocker. PBS plasma group was excluded in the statistical analysis in order to simplify graph. (FIG. 49B) Normalized blocking effect induced by different blockers in each vaccination group in response to ELISA antigens of Delta, SARS and MERS ECDs. The blocking effect was quantified by normalizing the blocker-induced AUC reduction with vaccine-specific AUC increase. The vaccine-specific AUC increase (100%) is calculated from AUC difference in PBS plasma group (0% or baseline) and vaccination group under the same antigen and blocker condition. The blocker-induced AUC reduction is the AUC difference between PBS and blocker treatment under the same vaccination and antigen condition.

[0091] FIGS. 50A-50E illustrate that full-length spike and RBD-oligomer LNP mRNAs elicited significant and distinct antibody responses to Omicron BA.2 and BA.5. FIG. 50A, antigen design of two spike full lengths (WT and BA.2) and three RBD oligomers. BA.2 RBD oligomers contain N-term signal peptide and C-term trimer foldon with or without virus-like particle (VLP) sequences including ferritin or human PEG10. FIG. 50B, structures of Omicron full length spike and spike RBD trimer (fibritin trimer foldon, PDB: 1RFO) on a ferritin nanoparticle (PDB: 5C6F). FIG. 50C, Significant binding antibody titers against BA.2 and BA.5 RBDs elicited by full-length spikes and RBD oligomers. Mice (n=5 in each group) were immunized with 5 μg spike full length or RBD oligomer LNP mRNAs on day 0 (prime) and day 14 (boost). Blood samples were collected on day 0 (pre-vaccination) and day 28 (2-week post boost). ELISA antibody titers were shown as area under curve (AUC) of dose response curves in supplementary FIG. 2. FIG. 50D, full length spike and RBD oligomer LNP mRNAs elicited neutralizing antibodies against BA.2 and BA.5. FIG. 50E, BA.2 (left) and BA.5 (right) binding and neutralizing titer correlation analysis. Only significant comparisons between day 28 groups were shown. Each dot in bar groups represents one mouse sample. Data are shown as mean #s.e.m.

[0092] FIGS. 51A-51E illustrate the size distribution of LNP mRNAs as characterized by dynamic light scattering. Graphs represent WT full length mRNA (FIG. 51A), BA.2 full length LNP mRNA (FIG. 51B), BA.2-RBD-ferritin LNP mRNA (FIG. 51C), BA.2 RBD-PEG10 LNP mRNA (FIG. 51D), and BA.2-RBD-ferritin trimer-LNP mRNA (FIG. 51E).

[0093] FIGS. 52A-52B illustrate plasma dilution-dependent response curves of BA.2 or BA.5 spike RBD binding antibodies in ELISA. FIGS. 52A-52B, BA.2 (left) or BA.5 (right) RBD binding OD450 response curves of serially diluted plasma collected on day 0 (FIG. 52A) and day 28 (FIG. 52B).

[0094] FIGS. 53A-53B illustrate plasma dilution-dependent curves of infection rate as quantified by normalized log₁₀ relative luminescence unit (RLU). FIGS. 53A-53B, Plasma dilution dependent infection curves of BA.2 (FIG. 53A) and BA.5 (FIG. 53B) pseudovirus neutralized by mice plasma before (day 0) or after two doses (day 28) of full-length spike or RBD oligomer LNP mRNA.

[0095] FIGS. 54A-54B illustrate a comparison of binding (FIG. 54A) and neutralizing (FIG. 54B) antibody titers against BA.2 vs. BA.5 antigens or pseudoviruses.

### DETAILED DESCRIPTION

[0096] The disclosed method and compositions may be understood more readily by reference to the following detailed description of certain embodiments and the Examples included therein and to the Figures and their previous and following description.

[0097] The coronavirus disease 2019 (COVID-19) pathogen, severe acute respiratory syndrome coronavirus (SARS-CoV-2), has infected over hundreds of millions of individuals, resulting in millions of deaths around the globe. Protective vaccines are critical to control the on-going COVID-19 pandemic as well as potential future outbreaks of emerging pathogenic coronaviruses. Lipid nanoparticle (LNP) based mRNA COVID-19 vaccines offer strong protection against SARS-CoV-2. However, multiple dangerous variant lineages have evolved, such as B.1.1.7, B.1.351, and B.1.617. These variants spread faster, cause more severe disease, can escape some host immunity, and cause high numbers of breakthrough infections. For example, the Delta variant has resulted in significant reduction of vaccine efficacy especially for those who received only a single dose, where early reports indicated the efficacy can be as low as only 33%. The significantly reduced efficacy partly explains why the Delta variant has caused wide-spread breakthrough infections despite the status of full vaccination.

[0098] In addition, pathogenic coronaviruses may continue to emerge around the world, in part due to the close contacts between humans and many wildlife species. New pathogenic viral strains or species may potentially give rise to future outbreaks or even pandemics. There are currently two recently authorized vaccines for SARS-CoV-2, however, there is no vaccine for other pathogenic coronavirus species, such as SARS-CoV and MERS-CoV. Even with the two leading RNA vaccines, many critical questions remain regarding the efficacy, durability, modes of action, effective populations, and breadth of protection against other coronavirus strains or species. Further, there has been no report or immunology study on a variant-specific vaccine to date. There is a need for more than one tool to be ready for such natural biological threats. These can be (1) broadly efficacious vaccines that can elicit protective immune responses against multiple coronaviruses; or (2) a highly efficient vaccine generation platform that is able to rapidly turnaround new vaccine candidates. Thus, our world needs multiple powerful pipelines with the ability to rapidly design, develop, test and characterize of novel vaccine candidates, to enable swift response to new and emerging pathogenic coronavirus strains or species.

[0099] The working Examples demonstrate the development of intelligent and potent coronavirus vaccines to protect against pathogenic coronavirus species, as well as their variants. LNP-mRNA vaccines were generated with mRNAs specifically encoding the B.1.351, B.1.617, and wildtype (WT) SARS-CoV-2 spikes, and animal models were used to systematically study the induced immune response. Mice receiving the LNP-mRNA spike vaccines developed dose-dependent and prime-boost-dependent antibody responses, including serum reactivity to receptor binding domains (RBDs) and full ectodomains (ECDs) of all three spikes, as well as potent neutralization activities. However, sera from mice receiving WT-LNP-mRNA showed significant reduction of neutralization ability against both B.1.351 and B.1.617. In contrast, sera from B.1.617-LNP-mRNA vaccinated mice showed strongest neutralization ability against the cognate B.1.617 spike. Sera from B.1.351-LNP-mRNA vaccinated mice showed similar neutralization ability against all three spikes. Flow cytometry showed that both B.1.351-LNP-mRNA and B.1.617-LNP-mRNA elicited strong antigen-specific CD8 T cell responses, as well as significant CD4 T cell responses. Single cell transcriptomics of B.1.351-LNP-mRNA and B.1.617-LNP-mRNA vaccinated animals revealed a systematic landscape of immune cell populations, as well as their associated global gene expression status. B.1.351-LNP-mRNA and B.1.617-LNP-mRNA vaccination induced a systemic increase in the reactive CD8 T cell population. Vaccinated animals showed a strong signature of increased expression of transcriptional and translational machineries in B and T cells. BCR-seq and TCR-seq unveiled repertoire diversity and clonality, and respective shifts in vaccinated animals. Animals from both B.1.351-LNP-mRNA and B.1.617-LNP-mRNA groups showed clonal TCR expansion, as evident in both single cell and bulk TCR-seq datasets. These data together provide direct assessment of in vivo immune responses and molecular profiles of vaccination using variant-specific LNP-mRNAs in pre-clinical animal models.

[0100] Thus, the vaccines described herein can potently neutralize SARS-CoV-2 variant lineages, such as B.1.1.7, B.1.351, and B.1.617. Also described are pan-coronavirus reactive vaccines that can confer protective immunity against not only the original SARS-CoV-2, but also its variant strains, as well as other pathogenic coronavirus species such as SARS-CoV and/or MERS-CoV. Also described are vaccines in which AAVs and virus like particles (VLPs) are used as the carriers of coronavirus mRNAs and/or proteins encoded therefrom.

[0101] It is to be understood that the disclosed method and compositions are not limited to specific synthetic methods, specific analytical techniques, or to particular reagents unless otherwise specified, and, as such, may vary. It is also to be understood that the terminology used herein is for the purpose of describing particular embodiments only and is not intended to be limiting.

### I. Definitions

[0102] Ranges may be expressed herein as from “about” one particular value, and/or to “about” another particular value. When such a range is expressed, also specifically contemplated and considered disclosed is the range from the one particular value and/or to the other particular value unless the context specifically indicates otherwise. Similarly, when values are expressed as approximations, by use of the antecedent “about,” it will be understood that the particular value forms another, specifically contemplated embodiment that should be considered disclosed unless the context specifically indicates otherwise. It will be further understood that the endpoints of each of the ranges are significant both in relation to the other endpoint, and independently of the other endpoint unless the context specifically indicates otherwise. It should be understood that all of the individual values and sub-ranges of values contained within an explicitly disclosed range are also specifically contemplated and should be considered disclosed unless the context specifically indicates otherwise. Finally, it should be understood that all ranges refer both to the recited range as a range and as a collection of individual numbers from and including the first endpoint to and including the second endpoint. In the latter case, it should be understood that any of the individual numbers can be selected as one form of the quantity, value, or feature to which the range refers. In this way, a range describes a set of numbers or values from and including the first endpoint to and including the second endpoint from which a single member of the set (i.e. a single number) can be selected as the quantity, value, or feature to which the range refers. The foregoing applies regardless of whether in particular cases some or all of these embodiments are explicitly disclosed.

[0103] “Introduce,” as used herein, refers to bringing into contact. By “contact” or “contacting” is meant to allow or promote a state of immediate proximity or association between at least two elements. For example, to introduce a composition (e.g., a vector containing a sequence encoding a spike protein or fragment thereof) to a cell is to provide contact between the cell and the composition. The term encompasses penetration of the contacted composition to the interior of the cell by any suitable means, e.g., via transfection, electroporation, transduction, gene gun, nanoparticle delivery, etc.

[0104] The term “operably linked” or “operationally linked” refers to functional linkage between a regulatory sequence and a heterologous nucleic acid sequence permitting them to function in their intended manner (e.g., resulting in expression of the latter). The term encompasses positioning of a regulatory region and a sequence to be transcribed in a nucleic acid so as to influence transcription or translation of such a sequence. For example, to bring a coding sequence under the control of a promoter, the translation initiation site of the translational reading frame of the polypeptide is typically positioned between one and about fifty nucleotides downstream of the promoter. A promoter can, however, be positioned as much as about 5,000 nucleotides upstream of the translation initiation site or about 2,000 nucleotides upstream of the transcription start site.

[0105] “Heterologous” is used herein in the context of two more elements having a different, non-native relation, relative position, or structure. The elements can include, but are not limited to, naturally occurring elements from the same or different organisms, chimeric elements, synthetic or engineered elements, etc., provided that the elements are not found in nature in the same relation, relative position, or structure.

[0106] “Chimeric” as used in the context of a nucleic acids and proteins describes a non-naturally occurring polynucleotide or polypeptide that is or has a sequence that is made by an artificial combination of two or more otherwise separated segments of sequence. In certain non-limiting embodiments, the sequences combined to form the chimeric nucleic acid or protein are derived from two or more different viral species or strains. This artificial combination is often accomplished by chemical synthesis or by the artificial manipulation of isolated segments of nucleic acids, e.g., by genetic engineering techniques known in the art (e.g., to facilitate addition, substitution, or deletion of a portion of the nucleic acid).

[0107] “Isolated” means altered or removed from the natural state. An isolated nucleic acid can exist in substantially purified form, or can exist in a non-native environment such as, for example, a host cell. An “isolated” nucleic acid encompasses a nucleic acid segment or fragment which has been separated from sequences which flank it in a naturally occurring state, e.g., a DNA fragment which has been removed from the sequences which are normally adjacent to the fragment in a genome in which it naturally occurs. The term also applies to nucleic acids which have been substantially purified from other components which naturally accompany the nucleic acid (e.g., RNA or DNA or proteins, which naturally accompany it in the cell). The term therefore includes, for example, a mRNA, or recombinant DNA which is incorporated into a vector, into an autonomously replicating plasmid or virus, or into the genomic DNA of a prokaryote or eukaryote, or which exists as a separate molecule (e.g., as a cDNA or a genomic or cDNA fragment produced by PCR or restriction enzyme digestion) independent of other sequences. Isolated does not require absolute purity, and can include protein, peptide, nucleic acid, or virus molecules that are at least 50% isolated, such as at least 75%, 80%, 90%, 95%, 98%, 99%, or even 99.9% isolate

[0108] A “vector” is a composition of matter which comprises an isolated nucleic acid and which can be used to deliver the isolated nucleic acid to the interior of a cell. Examples of vectors include but are not limited to, linear polynucleotides, polynucleotides associated with ionic or amphiphilic compounds, plasmids, and viruses. Thus, the term “vector” includes an autonomously replicating plasmid or a virus. The term is also construed to include non-plasmid and non-viral compounds which facilitate transfer of nucleic acid into cells, such as, for example, polylysine compounds, liposomes, and the like. Examples of viral vectors include, but are not limited to, adenoviral vectors, adeno-associated virus vectors, retroviral vectors, and the like. “Expression vector” refers to a vector containing a polynucleotide having expression control sequences operatively linked to a nucleotide sequence to be expressed. An expression vector contains sufficient cis-acting elements for expression; other elements for expression can be supplied by the host cell or in an in vitro expression system. Expression vectors include all those known in the art, such as cosmids, plasmids (e.g., naked or contained in liposomes), phagemids, BACs, YACs, and viral vectors (e.g., vectors derived from lentiviruses, retroviruses, adenoviruses, and adeno-associated viruses) that incorporate the recombinant polynucleotide.

[0109] The term “mutation” refers to a change in a sequence resulting in an alteration from a given reference sequence. Mutations include a substitution of a residue within a sequence, e.g., a nucleic acid or amino acid sequence, with another residue, or a deletion or insertion of one or more residues within a sequence. In certain non-limiting embodiments, the mutation can be a deletion, insertion, duplication, rearrangement, and/or substitution of at least one deoxyribonucleic acid base such as a purine (adenine and/or guanine) and/or a pyrimidine (thymine, uracil and/or cytosine). In certain non-limiting embodiments, the mutation can be a deletion, insertion, or substitution of at least one amino acid residue in a polypeptide. In certain non-limiting embodiments, mutations are described by identifying the original residue followed by the position of the residue within the sequence and by the identity of the newly substituted residue (e.g., K986P, V987P). Mutations may or may not produce discernible changes in the observable characteristics (phenotype) of a subject.

[0110] The term “percent (%) sequence identity” describes the percentage of nucleotides or amino acids in a candidate sequence that are identical with the nucleotides or amino acids in a reference nucleic acid sequence, after aligning the sequences and introducing gaps, if necessary, to achieve the maximum percent sequence identity. Alignment for purposes of determining percent sequence identity can be achieved in various ways that are within the skill in the art, for instance, using publicly available computer software such as BLAST, BLAST-2, ALIGN, ALIGN-2 or Megalign (DNASTAR) software. Appropriate parameters for measuring alignment, including any algorithms needed to achieve maximal alignment over the full-length of the sequences being compared can be determined by known methods.

[0111] The % sequence identity of a given nucleic acid or amino acid sequence C to, with, or against a given nucleic acid or amino acid sequence D (which can alternatively be phrased as a given sequence C that has or includes a certain % sequence identity to, with, or against a given sequence D) is calculated as follows:

100 times the fraction W/Z,

where W is the number of nucleotides or amino acids scored as identical matches by the sequence alignment program in that program's alignment of C and D, and where Z is the total number of nucleotides or amino acids in D. It will be appreciated that where the length of sequence C is not equal to the length of sequence D, the % sequence identity of C to D will not equal the % sequence identity of D to C.

[0112] The term “effective amount” means a quantity sufficient to provide a desired pharmacologic and/or physiologic effect.

[0113] As used herein, the term “encapsulate” means to enclose, surround or encase.

[0114] As used herein, “open reading frame” or “ORF” refers to a sequence which does not contain a stop codon in a given reading frame.

[0115] By “pharmaceutically acceptable” is meant a material that is not biologically or otherwise undesirable, i.e., the material can be administered to a subject along with the selected compound without causing any undesirable biological effects or interacting in a deleterious manner with any of the other components of the pharmaceutical composition in which it is contained.

[0116] As used herein, the term “subject” refers to any individual, organism or entity. Typical subjects include animals (e.g., mammals such as mice, rats, rabbits, goats, pigs, chimpanzees, or horses, non-human primates, and humans) and/or plants. The term does not denote a particular age or sex. Thus, adult and newborn subjects, as well as fetuses, whether male or female, are intended to be covered. The subject may be healthy or suffering from or susceptible to a disease, disorder, or condition.

[0117] Recitation of ranges of values are merely intended to serve as a shorthand method of referring individually to each separate value falling within the range, unless otherwise indicated herein, and each separate value is incorporated into the specification as if it were individually recited herein.

[0118] Use of the term “about” is intended to describe values either above or below the stated value in a range of approximately +/−10%; in other forms the values may range in value either above or below the stated value in a range of approximately +/−5%; in other forms the values may range in value either above or below the stated value in a range of approximately +/−2%; in other forms the values may range in value either above or below the stated value in a range of approximately +/−1%. The preceding ranges are intended to be made clear by context, and no further limitation is implied.

### II. Compositions

[0119] Nucleic acids, and compositions and methods of used thereof are disclosed. In particular, compositions, including pharmaceutical compositions, for the preparation and/or formulation of nucleic acids, and which are useful for the generation of vaccines are provided. The compositions are especially useful for delivery of nucleic acids, e.g., a ribonucleic acid (RNA) inside a cell, whether in vitro, in vivo, in situ or ex vivo.

[0120] Nucleic acids include any compound and/or substance that constitute a polymer of nucleotides, and hence, can be referred to as polynucleotides. Exemplary nucleic acids or polynucleotides include, but are not limited to, ribonucleic acids (RNAs), deoxyribonucleic acids (DNAs), threose nucleic acids (TNAs), glycol nucleic acids (GNAs), peptide nucleic acids (PNAs), locked nucleic acids (LNAs), and hybrids thereof.

A. mRNAs

[0121] In certain embodiments, the disclosed nucleic acids are, or include, ribonucleic acids. A non-limiting ribonucleic acid is messenger RNA (mRNA). The term messenger RNA (mRNA) can refer to any ribonucleic acid which directly encodes a polypeptide of interest. Thus, the disclosed mRNAs are capable of being translated to produce one or more encoded polypeptides of interest. In certain non-limiting embodiments, the mRNAs are produced by in vitro transcription.

[0122] The mRNAs can be of any suitable length. For example, the length can vary depending upon the size of the encoded polypeptide. mRNA molecules are typically between 200 and 10,000 nucleotides in length. In certain non-limiting embodiments, a mRNA includes about 35, 40, 45, 50, 55, 60, 70, 80, 90, 100, 120, 140, 160, 180, 200, 250, 300, 350, 400, 450, 500, 600, 700, 800, 900, 1,000, 1,100, 1,200, 1,300, 1,400, 1,500, 1,600, 1,700, 1,800, 1,900, 2,000, 2,500, and 3,000, 4,000, 5,000, 6,000, 7,000, 8,000, 9,000, 10,000, 20,000, 30,000, 40,000, 50,000, 60,000, 70,000, 80,000, 90,000 or 100,000 nucleotides, with or without the poly(A) tail, 5′ UTR, and/or 3′ UTR.

[0123] The mRNAs can be codon optimized. For example, the mRNAs can be codon optimized for expression in a eukaryotic cell. The eukaryotic cell can be those of or derived from a particular organism, such as a plant or a mammal, including but not limited to human, or non-human eukaryote or animal or mammal, e.g., mouse, rat, rabbit, dog, livestock, or non-human mammal or primate. Codon-optimization describes gene engineering approaches that use changes of rare codons to synonymous codons that are more frequently used in the cell type of interest with the aim of increasing protein production. In general, codon optimization involves modifying a nucleic acid sequence for enhanced expression in the host cells of interest by replacing at least one codon (e.g., about or more than about 1, 2, 3, 4, 5, 10, 15, 20, 25, 50, or more codons) of the native sequence with codons that are more frequently or most frequently used in the genes of that host cell while maintaining the native amino acid sequence. Various species exhibit particular bias for certain codons of a particular amino acid. Codon bias (differences in codon usage between organisms) often correlates with the efficiency of translation of messenger RNA, which is in turn believed to be dependent on, among other things, the properties of the codons being translated and the availability of particular transfer RNA (tRNA) molecules. The predominance of selected tRNAs in a cell is generally a reflection of the codons used most frequently in peptide synthesis. Accordingly, genes can be tailored for optimal gene expression in a given organism based on codon optimization. Codon usage tables are readily available, for example, at the “Codon Usage Database” available at www.kazusa.orjp/codon/ and these tables can be adapted in a number of ways. See for example, Nakamura, Y., et al., Nucl. Acids Res., 28:292 (2000). Computer algorithms for codon optimizing a particular sequence for expression in a particular host cell are also available, such as Gene Forge (Aptagen; Jacobus, PA). In certain non-limiting embodiments, one or more codons (e.g., 1, 2, 3, 4, 5, 10, 15, 20, 25, 50, or more, or all codons) in a mRNA corresponds to the most frequently used codon for a particular amino acid.

[0124] Typically, the disclosed isolated messenger ribonucleic acids (mRNAs) contain a 5′ untranslated region (UTR), a 3′ UTR, and an open reading frame (also referred to as coding region). In certain non-limiting embodiments, the mRNAs further include a 5′ cap or an analog thereof, a poly(A) tail, one or more modified nucleotides, or a combination thereof. In certain embodiments, the mRNAs include at least a 5′ cap or analog thereof, a 5′ UTR, a 3′ UTR, one or more open reading frames, and a poly(A) tail. In certain embodiments, the mRNAs include at least a 5′ cap or analog thereof, a 5′ UTR, a 3′ UTR, one or more open reading frames, a poly(A) tail, and one or more modified nucleotides.

[0125] The mRNA can include different caps or cap analogs (e.g., ARCA). The body of the mRNA can use modified nucleosides. The one or more coding sequences or open reading frames can include various elements such as signal peptides, localization signals (e.g., NLSs), inteins, etc. The structures of the mRNA can be engineered to optimize GC motifs, folding, circularization signals, and/or structured UTR elements.

[0126] In certain non-limiting embodiments, the open reading frame encodes a pathogen derived antigen, such as a bacterial, fungal, or viral protein. In certain non-limiting embodiments, the open reading frame encodes all or a portion of one or more proteins from a virus, such as but not limited to a coronavirus, such as SARS-CoV, MERS-CoV, or SARS-CoV-2. In certain embodiments, the open reading frame encodes a coronavirus spike protein sequence, wherein the spike protein sequence includes all or a portion of a coronavirus spike protein. The spike protein can be derived from, for example, SARS-CoV, MERS-CoV, or SARS-CoV-2, including variants thereof.

[0127] Thus, a non-limiting mRNA includes a 5′ UTR, a 3′ UTR, and an open reading frame encoding a spike protein sequence derived from SARS-CoV, MERS-CoV, or SARS-CoV-2, including variants thereof, and optionally a 5′ cap or an analog thereof, a poly(A) tail, one or more modified nucleotides, or a combination thereof.

[0128] In some certain embodiments, the mRNA is a chimeric (also referred to as hybrid) mRNA. The chimeric mRNA can include one or more (e.g., 1, 2, 3, 4, 5) open reading frames which encode a chimeric (hybrid) spike protein or subunit or other fragment thereof which has sequences from different viral species or variants. For example, a chimeric mRNA can include a 5′ UTR, a 3′ UTR, and one open reading frame which encodes two or more different spike protein sequences (e.g., complete spike proteins or subunits or other fragments thereof) in frame with each other from distinct coronavirus species or variants thereof. As another example, a chimeric mRNA can include a 5′ UTR, a 3′ UTR, and two or more open reading frames, wherein each open reading frame encodes a different spike protein sequence, wherein each spike protein sequence includes a spike protein or subunit or other fragment thereof from the spike protein of a distinct coronavirus species or variant thereof. In certain non-limiting embodiments, the chimeric mRNA does not include a linker or other domain intervening between the two or more open reading frames.

[0129] In certain non-limiting embodiments, the mRNA includes a first open reading frame and a second open reading frame. In certain non-limiting embodiments, the first open reading frame encodes a spike protein or subunit or other fragment thereof (e.g., ECD, S1, S2, NTD, RBD) of a coronavirus selected from SARS-CoV, MERS-CoV, SARS-CoV-2 and variants thereof, and the second open reading frame encodes a spike protein or subunit or other fragment thereof (e.g., ECD, S1, S2, NTD, RBD) of a coronavirus selected from SARS-CoV, MERS-CoV, SARS-CoV-2 and variants thereof. In certain non-limiting embodiments, the spike protein or subunit or other fragment thereof encoded by the first open reading frame is from a different viral species or variant from the spike protein or subunit or other fragment thereof encoded by the second open reading frame.

[0130] Non-limiting examples of chimeric spike proteins or subunits or other fragment thereof include, a chimeric protein having an S1 subunit from SARS-CoV-2 B.1.351 and an S2 subunit from SARS-CoV-2 B.1.617 (e.g., B.1.617.2 or B.1.617.3), a chimeric protein having an S1 subunit from SARS-CoV and an S2 subunit from SARS-CoV-2 (e.g., native/wildtype, B.1.1.7, B.1.351, B.1.617.2, B.1.617.3), a chimeric protein having an S1 subunit from MERS-CoV and an S2 subunit from SARS-CoV-2 (e.g., native/wildtype, B.1.1.7, B.1.351, B.1.617.2, B.1.617.3), and a chimeric protein having an S1 subunit from MERS-CoV and an S2 subunit from SARS-CoV. Also disclosed are variants of the foregoing in which the viral species or strains from which the S1 and S2 subunits are derived are reversed. In any of the foregoing, the S2 subunit can include one or more mutations, such as proline substitutions that stabilize the spike protein in a prefusion conformation. It is to be understood that while the foregoing examples describe S1 and S2 subunits. In certain non-limiting embodiments, the S1 and/or S2 subunits can be substituted with other spike proteins or subunits or other fragment thereof (e.g., ECD, NTD, RBD).

[0131] In certain non-limiting embodiments, each spike protein or subunit or other fragment thereof contains a SPY tag/catcher sequence positioned at the N-terminus or C-terminus. In certain non-limiting embodiments, a chimeric mRNA can include one or more open reading frames encoding a chimeric spike protein in which the mRNA includes a sequence encoding a 2A self-cleaving peptide between adjacent open reading frames or sequences from each distinct viral species or variant. 2A peptides are 18-22 amino acid long viral oligopeptides that mediate cleavage of polypeptides during translation in eukaryotic cells. The mechanism of 2A-mediated self-cleavage is thought to be ribosome skipping the formation of a glycyl-prolyl peptide bond at the C-terminus of the 2A. Suitable 2A self-cleaving peptides include F2A (foot-and-mouth disease virus), E2A (equine rhinitis A virus), P2A (porcine teschovirus-1 2A), and T2A (Thosea asigna virus 2A).

[0132] For example, a chimeric mRNA can include one or more open reading frames encoding an S1 subunit of SARS-CoV-2 variant (e.g., SARS-CoV-2 native/wildtype, B.1.1.7, B.1.351, B.1.617.2, B.1.617.3), an S1 subunit of SARS-CoV, and an S1 subunit of MERS-CoV. In certain non-limiting embodiments, the mRNA includes sequences such that each subunit independently includes a SPY tag that, for example, can be fused to the C-terminus of the subunit. In certain non-limiting embodiments, the mRNA further includes a sequence encoding a 2A self-cleaving peptide between each subunit, such that upon translation, separate S1 protein subunits are produced, each having the SPY tag (see, e.g., FIG. 10). In certain non-limiting embodiments, a corresponding mRNA contains an open reading frame encoding an S2 subunit of a coronavirus spike protein in combination with a sequence encoding a SPY catcher at the N-terminus of the spike S2 subunit. Upon translation, the S2 subunit is produced with a SPY catcher at the N-terminus. Upon being brought into close proximity (e.g., by translation in the same cell), a combined protein can be produced by covalent attachment of an S1 subunit with a SPY tag fused to the C-terminus and an S2 subunit with a SPY catcher fused to the N-terminus (see, e.g., FIGS. 9-10).

i. 5′ cap

[0133] Typically, the 5′ cap of an mRNA is involved in nuclear export, increasing mRNA stability and binding the mRNA Cap Binding Protein (CBP), which is responsible for mRNA stability in the cell and translation competency through the association of CBP with poly(A) binding protein to form the mature cyclic mRNA species. Endogenous mRNA molecules may be 5′-end capped generating a 5′-ppp-5′-triphosphate linkage between a terminal guanosine cap residue and the 5′-terminal transcribed sense nucleotide of the mRNA molecule. This 5′-guanylate cap may then be methylated to generate an N7-methyl-guanylate residue. In certain non-limiting embodiments, the mRNA contains a non-hydrolyzable cap, which can prevent or hinder decapping and thus increase the mRNA half-life. Because cap structure hydrolysis requires cleavage of 5′-ppp-5′ phosphodiester linkages, the 5′ cap can include modified nucleotides to prevent such hydrolysis.

[0134] The 5′ cap may be a single nucleotide or a series of nucleotides. For example, the cap may include from 1 to 10, e.g., 2-9, 3-8, 4-7, 1-5, 5-10, or at least 1 or 2, or 10 or fewer nucleotides in length. In certain non-limiting embodiments, the cap is absent.

[0135] Cap analogs differ from natural (e.g., endogenous, wild-type or physiological) 5′-caps in their chemical structure, while retaining cap function. Cap analogs may be chemically (e.g., non-enzymatically) or enzymatically synthesized and/or linked to a nucleic acid molecule. For example, the Anti-Reverse Cap Analog (ARCA) cap contains two guanines linked by a 5′-5′-triphosphate group, wherein one guanine contains an N7 methyl group as well as a 3′-O-methyl group (i.e., N7,3′-O-dimethyl-guanosine-5′-triphosphate-5′-guanosine (m⁷G-3′mppp-G; which may equivalently be designated 3′ O-Me-m7G(5′)ppp(5′)G). The 3′-O atom of the other, unmodified, guanine becomes linked to the 5′-terminal nucleotide of the capped nucleic acid molecule (e.g., mRNA). The N7- and 3′-O-methylated guanine provides the terminal moiety of the capped nucleic acid molecule. Another exemplary cap is mCAP, which is similar to ARCA but has a 2′-O-methyl group on guanosine (i.e., N7,2′-O-dimethyl-guanosine-5′-triphosphate-5′-guanosine, m⁷Gm-ppp-G).

[0136] In certain non-limiting embodiments, a 5′ cap may include endogenous caps or cap analogs. For example, a 5′ cap may include a guanine analog. Useful guanine analogs include, but are not limited to, inosine, N1-methyl-guanosine, 2′fluoro-guanosine, 7-deaza-guanosine, 8-oxo-guanosine, 2-amino-guanosine, LNA-guanosine, and 2-azido-guanosine.

[0137] Suitable 5′ caps or analogs that can be included in the mRNAs are known in the art and include, without limitation, 7mG(5′)ppp(5′)N,pN2p (cap 0), 7mG(5′)ppp(5′)NlmpNp (cap 1), 7mG(5′)-ppp(5′)NlmpN2mp (cap 2), ARCA, beta-S-ARCA, m7G, mCAP, inosine, N1-methyl-guanosine, 2′-fluoro-guanosine, 7-deaza-guanosine, 8-oxo-guanosine, 2-amino-guanosine, LNA-guanosine, tri-methylgranosine (TMG), nicotinamide adenine dinucleotide (NAD), cap AG, cap AU, cap GG, and 2-azido-guanosine.

ii. Untranslated Regions

[0138] Untranslated regions (UTRs) are regions of a gene that are transcribed, but not translated. Generally, the 5′UTR starts at the transcription start site and continues to the start codon but does not include the start codon; whereas the 3′UTR starts immediately following the stop codon and continues until the transcriptional termination signal. 5′ UTRs can harbor specific regions, like Kozak sequences which are be involved in the initiation of translation by the ribosome. 5′ UTRs also have been known to form secondary structures which are involved in elongation factor binding. The UTRs can have important regulatory effects on an associated mRNA, for example impacting stability and/or translation of the mRNA. Generally, translational efficiency (including activation or inhibition of translation) of mRNAs can be controlled by the UTRs. In certain non-limiting embodiments, the regulatory features of a UTR can be incorporated into the disclosed mRNAs, to enhance the stability of the molecule. In certain non-limiting embodiments, the mRNAs are engineered to contain the UTRs found in abundantly expressed genes to enhance the enhance the stability and protein production from the mRNA. For example, introduction of 5′ UTR of liver-expressed mRNA, such as albumin, serum amyloid A, Apolipoprotein A/B/E, transferrin, alpha fetoprotein, erythropoietin, or Factor VIII, could be used to enhance expression of an mRNA. Likewise, use of 5′ UTR from other tissue-specific mRNA to improve expression in that tissue is possible for muscle (MyoD, Myosin, Myoglobin, Myogenin, Herculin), for endothelial cells (Tie-1, CD36), for myeloid cells (C/EBP, AML1, G-CSF, GM-CSF, CD11b, MSR, Fr-1, i-NOS), for leukocytes (CD45, CD18), for adipose tissue (CD36, GLUT4, ACRP30, adiponectin) and for lung epithelial cells (SP-A/B/C/D).

iii. Poly(A) Tails

[0139] During RNA processing, a long chain of adenine nucleotides, referred to as the poly(A) tail, may be added to a polynucleotide such as an mRNA in order to increase stability. Immediately after transcription, the 3′ end of the transcript may be cleaved to free a 3′ hydroxyl. Then, poly-A polymerase adds a chain of adenine nucleotides to the RNA. The process, called polyadenylation, adds a poly(A) tail that can be between, for example, approximately 100 and 250 residues long.

[0140] In certain non-limiting embodiments, the poly(A) tail includes about 10-100, about 100-300, about 100-250, or about 100-200 adenines. In certain non-limiting embodiments, the poly(A) tail contains about 10, 15, 20, 25, 30, 35, 40, 45, 50, 55, 60, 65, 70, 75, 80, 85, 90, 95, 100, 120, 140, 160, 180, 200, 250, 300, 350, 400, 450, 500, 600, 700, 800, 900, 1,000, 1,100, 1,200, 1,300, 1,400, 1,500, 1,600, 1,700, 1,800, 1,900, 2,000, 2,500, or 3,000 nucleotides.

iv. Modified Nucleotides

[0141] The mRNA can be modified or unmodified. The mRNA can be modified for example, to optimize translation, and/or to confer increased stability and/or expression. In certain non-limiting embodiments, a mRNA or other modified polynucleotide may exhibit reduced degradation when introduced to a cell as compared to a corresponding unmodified polynucleotide.

[0142] The modified mRNA or other modified polynucleotide can incorporate a number of chemical changes to the nucleotides, including changes to the nucleobase, the ribose or deoxyribose sugar, and/or the phosphodiester linkage. One or more atoms of a pyrimidine nucleobase may be replaced or substituted with optionally substituted amino, optionally substituted thiol, optionally substituted alkyl (e.g., methyl or ethyl), or halo (e.g., chloro or fluoro). In certain forms, modifications (e.g., one or more modifications) are present in each of the sugar and the internucleotide linkage.

[0143] Backbone phosphate groups can be modified by replacing one or more of the oxygen atoms with a different substituent. Examples of modified phosphate groups include, but are not limited to, phosphorothioate, phosphoroselenates, boranophosphates, boranophosphate esters, hydrogen phosphonates, phosphoramidates, phosphorodiamidates, alkyl or aryl phosphonates, and phosphotriesters. Phosphorodithioates have both non-linking oxygens replaced by sulfur. The phosphate linker can also be modified by the replacement of a linking oxygen with nitrogen (bridged phosphoramidates), sulfur (bridged phosphorothioates), and carbon (bridged methylene-phosphonates). Phosphorothioate DNA and RNA have increased nuclease resistance, and subsequently, a longer half-life in a cellular environment.

[0144] In certain embodiments, the mRNA or other polynucleotide includes one or more modified nucleotides. For example, the mRNA or other polynucleotide can include one or more modified guanine-, adenine-, cytosine-, thymidine-, and/or uridine-containing nucleotides. Suitable modified nucleotides/nucleosides include, without limitation, pseudouridine, N1-methyl-pseudouridine, N1-Methylpseudouridine-5′-Triphosphate-(N-1081), 1-ethylpseudouridine, 2-thiouridine, 4′-thiouridine, 5-methoxyuridine, 5-methoxyuridine, N6-methyladenosine, 5-methylcytosine, 5-aza-cytidine, 6-aza-cytidine, pseudoisocytidine, 3-methyl-cytidine, N4-acetyl-cytidine, 5-formyl-cytidine, N4-methyl-cytidine, 5-methyl-cytidine, 5-halo-cytidine (e.g., 5-iodo-cytidine), 5-hydroxymethyl-cytidine, 1-methyl-pseudoisocytidine, 2-amino-purine, 2,6-diaminopurine, 2-amino-6-halo-purine (e.g., 2-amino-6-chloro-purine), 6-halo-purine (e.g., 6-chloro-purine), 2-amino-6-methyl-purine, 1-methyl-adenosine, 2-methyl-adenine, N6-methyl-adenosine, 2-methylthio-N6-methyl-adenosine, N6-isopentenyl-adenosine, inosine, 1-methyl-inosine, wyosine, methylwyosine, 6-thio-guanosine, 6-thio-7-deaza-guanosine, 6-thio-7-deaza-8-aza-guanosine, 7-methyl-guanosine, 6-thio-7-methyl-guanosine, 7-methyl-inosine, and 6-methoxy-guanosine. For example, N1-Methylpseudouridine-5′-Triphosphate-(N-1081) can be utilized during in vitro transcription so that it is incorporated into the mRNA.

[0145] In certain non-limiting embodiments, all of the instances of a given nucleotide (e.g., every G, every A, every C, every T, or every U) are modified. In certain non-limiting embodiments, a fraction of the instances of a given nucleotide are modified. For example, about 0.1%, 1%, 5%, 10%, 15%, 20%, 25%, 30%, 35%, 40%, 45%, 50%, 55%, 60%, 65%, 70%, 75%, 80%, 85%, 90%, 95%, 96%, 97%, 98%, or 99% of a given nucleotide can be modified.

[0146] As a non-limiting example, the nucleotide uridine may be substituted with a modified nucleotide described herein, such as N1-methyl-pseudouridine. In certain non-limiting embodiments, the uridine in the mRNA is partially substituted. For example, about 0.1%, 1%, 5%, 10%, 15%, 20%, 25%, 30%, 35%, 40%, 45%, 50%, 55%, 60%, 65%, 70%, 75%, 80%, 85%, 90%, 95%, 96%, 97%, 98%, or 99% of the uridine in a given mRNA may be substituted with a modified nucleotide, such as N1-methyl-pseudouridine. For example, in some certain embodiments, about 50% of uridine is substituted with a modified nucleotide, such as N1-methyl-pseudouridine.

### V. Open Reading Frame Encoded Polypeptides

[0147] The mRNAs contain sequences that encode polypeptides of interest. For example, an mRNA can contain one or more open reading frames, each of which encodes one or more polypeptides. Typically, the open reading frame encodes an antigen (e.g., protein or peptide) from a pathogenic microorganism, such as bacteria, fungi, protozoa, or virus. In certain non-limiting embodiments, the open reading frame encodes one or more proteins from a virus, or an immune-response inducing fragment or variant thereof.

### Coronavirus Polypeptides

[0148] In certain non-limiting embodiments, the mRNA includes an open reading frame that encodes one or more immunogenic proteins or subunits or other fragments thereof from a coronavirus. Coronaviruses are large, enveloped, positive-stranded RNA viruses (Li, “Structure, Function, and Evolution of Coronavirus Spike Proteins,” Annual Review of Virology, 3:1, 237-261 (2016)). Coronaviruses are phylogenetically divided into four genera (α, β, γ, δ), with betacoronaviruses further subdivided into four lineages (A, B, C, D). Coronaviruses infect a wide range of avian and mammalian species, including humans.

[0149] Coronaviruses have the largest genome among RNA viruses, typically ranging from 26 to 32 kb. The genome is packed inside a helical capsid formed by the nucleocapsid protein (N) and further surrounded by an envelope. Associated with the viral envelope are at least three structural proteins: the membrane protein (M) and the envelope protein (E) are involved in virus assembly, whereas the spike protein(S) mediates virus entry into host cells. Some coronaviruses also encode an envelope-associated hemagglutinin-esterase protein (HE). Thus, In certain non-limiting embodiments, the mRNA open reading frame encodes a coronavirus M, S, and/or E protein, or an immune response-inducing subunit, fragment, or variant derived therefrom.

[0150] Among these structural proteins, the spike protein forms large protrusions from the virus surface, giving coronaviruses the appearance of having crowns. In addition to mediating virus entry, the spike is an important determinant of viral host range and tissue tropism and a major inducer of host immune responses. The coronavirus spike contains three segments: a large ectodomain, a single-pass transmembrane anchor, and a short intracellular tail. The ectodomain includes a receptor-binding S1 subunit and a membrane-fusion S2 subunit. The spike protein is initially synthesized as a precursor protein. Individual precursor S polypeptides form a homotrimer and undergo glycosylation within the Golgi apparatus as well as processing to remove the signal peptide, and cleavage by a cellular protease to generate separate S1 and S2 polypeptide chains, which remain associated as S1/S2 protomers within the homotrimer (which is therefore a trimer of heterodimers). The S1 subunit contains the N-terminal domain (NTD) and receptor-binding domain (RBD) which mediates virus attachment to its host receptor. The S2 subunit contains fusion protein machinery, such as the fusion peptide, two heptad-repeat sequences (HR1 and HR2) and a central helix typical of fusion glycoproteins, a transmembrane domain, and the cytosolic tail domain. The spike is a clove-shaped trimer with three S1 heads and a trimeric S2 stalk. During virus entry, S1 binds to a receptor on the host cell surface for viral attachment, and S2 fuses the host and viral membranes, allowing viral genomes to enter host cells.

[0151] Thus, in certain embodiments, the mRNA open reading frame encodes a spike protein sequence, wherein the spike protein sequence includes all or a portion of a coronavirus spike protein, such as a coronavirus species or variant disclosed herein. For example, the open reading frame can encode a coronavirus spike protein or subunit or other fragment thereof (e.g., ECD, S1, S2, NTD and/or RBD), optionally wherein the coronavirus spike protein or subunit or other fragment thereof is derived from one of the species or exemplary viruses mentioned below.

[0152] Non-limiting examples of betacoronaviruses include Middle East respiratory syndrome coronavirus (MERS-CoV), Severe Acute Respiratory Syndrome coronavirus (SARS-CoV), SARS-CoV-2, Human coronavirus HKU1 (HKU1-CoV), Human coronavirus OC43 (OC43-CoV), Murine Hepatitis Virus (MHV-CoV), Bat SARS-like coronavirus WIV1 (WIV1-CoV), RaTG13 bat coronavirus, and Human coronavirus HKU9 (HKU9-CoV). Non-limiting examples of alphacoronaviruses include human coronavirus 229E (229E-CoV), human coronavirus NL63 (NL63-CoV), porcine epidemic diarrhea virus (PEDV), and Transmissible gastroenteritis coronavirus (TGEV). A non-limiting example of a deltacoronavirus is the Swine Delta Coronavirus (SDCV).

[0153] Representative coronaviruses include SARSr-CoV BtKY72, SARS-CoV, SARS-CoV-2, SARSr-CoV RaTG13, SARS-CoV PC4-227, Bat-Hp-BetaCovC, Ro-BatCoV GCCDC1, Ro-BatCoV HKU9, Pi-BatCoV HKU5, Ty-BatCoV HKU4, MERS-CoV, EriCoV, MHV, HCoV HKU1, ChRCoV HKU24, ChRCovC HKU24, MrufCoV 2JL14, HCoV NL63, HCoV 229E, and HCoV OC43. See, e.g., Coronaviridae Study Group of the International Committee on Taxonomy of Viruses, Nat Microbiol 2020. DOI: 10.1038/s41564-020-0695-z), which is specifically incorporated by reference in its entirety.

[0154] In certain embodiments, the coronavirus is selected from SARS-CoV, MERS-CoV, and SARS-CoV-2. SARS-CoV2 is a new β-coronavirus after the previously identified SARS-CoV and MERS-CoV which led to pulmonary failure and potentially fatal respiratory tract infection. SARS-CoV-2 causes Coronavirus disease 2019 (COVID-2019). SARS-CoV-2 spike protein facilitates entry of the virus into host cells by binding to angiotensin-converting enzyme 2 (ACE2) expressed in lower respiratory tract cells. The spike is cleaved by the host cell furin-like protease into the S1 and S2 subunits. Table 1 describes the typical architecture of a wildtype SARS-CoV-2 spike protein (see also UniProtKB ID NO. P0DTC2 (SPIKE_SARS2)). In certain embodiments, the open reading frame encodes a coronavirus spike protein or subunit or other fragment thereof (e.g., ECD, S1, S2, NTD and/or RBD), from SARS-CoV, MERS-CoV, or SARS-CoV-2.

TABLE 1
Features of wildtype SARS-CoV-2 Spike Protein

| Feature key | Position(s) | Description |
|---|---|---|
| Signal peptide | 1-12 | |
| Chain | 13-1273 | Spike glycoprotein |
| PRO_0000449646 | | |
| Chain | 13-685 | Spike protein S1 |
| PRO_0000449647 | | |
| Chain | 686-1273 | Spike protein S2 |
| PRO_0000449648 | | |
| Chain | 816-1273 | Spike protein S2′ |
| PRO_0000449649 | | |

[0155] Various strains/variants of the foregoing viruses are known and include, without limitation, SARS-CoV-2 B.1.1.7 (Alpha variant), SARS-CoV-2 B.1.351 (Beta variant, including B.1.351.2, and B.1.351.3), SARS-CoV-2 B.1.617 (including SARS-CoV-2 B.1.617.1 (Kapa), SARS-CoV-2 B.1.617.2 (Delta), and SARS-CoV-2 B.1.617.3), gamma variant (including P.1, P.1.1, and P.1.2), Epsilon variant B.1.427 and B.1.429, Eta variant B.1.525, Iota variant B.1.526, Zeta variant P.2, Mu variant B.1.621, B.1.621.1, B.1.1.529/BA.1 (Omicron variant), BA.5, BA.2, BA.2.12.1, and BA.4/5. and other emerging global or regional variants. Thus, in certain embodiments, the open reading frame encodes a coronavirus spike protein or subunit or other fragment thereof (e.g., ECD, S1, S2, NTD and/or RBD) from any of the foregoing strains/variants.

[0156] Exemplary gene, protein, and genomic sequences of the foregoing coronavirus species and strains are known in the art. See, for example, the sequences and accession numbers provided in, Coronaviridae Study Group of the International Committee on Taxonomy of Viruses, Nat Microbiol 2020. (DOI: 10.1038/s41564-020-0695-z), which is hereby incorporated by reference in its entirety. For example, GenBank Accession No. MN908947.3, which is specifically incorporated by reference herein in its entirety, provides a (DNA) genomic sequence for SARS-CoV-2 (Severe acute respiratory syndrome coronavirus 2 isolate Wuhan-Hu-1, complete genome). GenBank Accession No. MN985325.1, which is specifically incorporated by reference herein in its entirety, also provides a genomic DNA sequence for SARS-CoV-2 (Severe acute respiratory syndrome coronavirus 2 isolate 2019-nCoV/USA-WA1/2020, complete genome). It will be appreciated that the sequences are provided as DNA sequences, but the viral genome itself will typically have the corresponding RNA sequences. Thus, the corresponding RNA sequences are also expressly provided herein.

An exemplary cDNA sequence that encodes a
SARS-CoV-2 wildtype (Wuhan-Hu-1) spike
protein is:
(SEQ ID NO: 1)
ATGTTTGTGTTCCTGGTGCTGCTGCCACTGGTGTCCAGCCA
GTGTGTGAACCTGACCACCAGGACCCAACTTCCTCCTGCCT
ACACCAACTCCTTCACCAGGGGAGTCTACTACCCTGACAAG
GTGTTCAGGTCCTCTGTGCTGCACAGCACCCAGGACCTGTT
CCTGCCATTCTTCAGCAATGTGACCTGGTTCCATGCCATCC
ATGTGTCTGGCACCAATGGCACCAAGAGGTTTGACAACCCT
GTGCTGCCATTCAATGATGGAGTCTACTTTGCCAGCACAGA
GAAGAGCAACATCATCAGGGGCTGGATTTTTGGCACCACCC
TGGACAGCAAGACCCAGTCCCTGCTGATTGTGAACAATGCC
ACCAATGTGGTGATTAAGGTGTGTGAGTTCCAGTTCTGTAA
TGACCCATTCCTGGGAGTCTACTACCACAAGAACAACAAGT
CCTGGATGGAGTCTGAGTTCAGGGTCTACTCCTCTGCCAAC
AACTGTACCTTTGAATATGTGAGCCAACCATTCCTGATGGA
CTTGGAGGGCAAGCAGGGCAACTTCAAGAACCTGAGGGAGT
TTGTGTTCAAGAACATTGATGGCTACTTCAAGATTTACAGC
AAACACACACCAATCAACCTGGTGAGGGACCTGCCACAGGG
CTTCTCTGCCTTGGAACCACTGGTGGACCTGCCAATTGGCA
TCAACATCACCAGGTTCCAGACCCTGCTGGCTCTGCACAGG
TCCTACCTGACACCTGGAGACTCCTCCTCTGGCTGGACAGC
AGGAGCAGCAGCCTACTATGTGGGCTACCTCCAACCAAGGA
CCTTCCTGCTGAAATACAATGAGAATGGCACCATCACAGAT
GCTGTGGACTGTGCCCTGGACCCACTGTCTGAGACCAAGTG
TACCCTGAAATCCTTCACAGTGGAGAAGGGCATCTACCAGA
CCAGCAACTTCAGGGTCCAACCAACAGAGAGCATTGTGAGG
TTTCCAAACATCACCAACCTGTGTCCATTTGGAGAGGTGTT
CAATGCCACCAGGTTTGCCTCTGTCTATGCCTGGAACAGGA
AGAGGATTAGCAACTGTGTGGCTGACTACTCTGTGCTCTAC
AACTCTGCCTCCTTCAGCACCTTCAAGTGTTATGGAGTGAG
CCCAACCAAACTGAATGACCTGTGTTTCACCAATGTCTATG
CTGACTCCTTTGTGATTAGGGGAGATGAGGTGAGACAGATT
GCCCCTGGACAAACAGGCAAGATTGCTGACTACAACTACAA
ACTGCCTGATGACTTCACAGGCTGTGTGATTGCCTGGAACA
GCAACAACCTGGACAGCAAGGTGGGAGGCAACTACAACTAC
CTCTACAGACTGTTCAGGAAGAGCAACCTGAAACCATTTGA
GAGGGACATCAGCACAGAGATTTACCAGGCTGGCAGCACAC
CATGTAATGGAGTGGAGGGCTTCAACTGTTACTTTCCACTC
CAATCCTATGGCTTCCAACCAACCAATGGAGTGGGCTACCA
ACCATACAGGGTGGTGGTGCTGTCCTTTGAACTGCTCCATG
CCCCTGCCACAGTGTGTGGACCAAAGAAGAGCACCAACCTG
GTGAAGAACAAGTGTGTGAACTTCAACTTCAATGGACTGAC
AGGCACAGGAGTGCTGACAGAGAGCAACAAGAAGTTCCTGC
CATTCCAACAGTTTGGCAGGGACATTGCTGACACCACAGAT
GCTGTGAGGGACCCACAGACCTTGGAGATTCTGGACATCAC
ACCATGTTCCTTTGGAGGAGTGTCTGTGATTACACCTGGCA
CCAACACCAGCAACCAGGTGGCTGTGCTCTACCAGGATGTG
AACTGTACTGAGGTGCCTGTGGCTATCCATGCTGACCAACT
TACACCAACCTGGAGGGTCTACAGCACAGGCAGCAATGTGT
TCCAGACCAGGGCTGGCTGTCTGATTGGAGCAGAGCATGTG
AACAACTCCTATGAGTGTGACATCCCAATTGGAGCAGGCAT
CTGTGCCTCCTACCAGACCCAGACCAACAGCCCAAGGAGGG
CAAGGTCTGTGGCAAGCCAGAGCATCATTGCCTACACAATG
AGTCTGGGAGCAGAGAACTCTGTGGCTTACAGCAACAACAG
CATTGCCATCCCAACCAACTTCACCATCTCTGTGACCACAG
AGATTCTGCCTGTGAGTATGACCAAGACCTCTGTGGACTGT
ACAATGTATATCTGTGGAGACAGCACAGAGTGTAGCAACCT
GCTGCTCCAATATGGCTCCTTCTGTACCCAACTTAACAGGG
CTCTGACAGGCATTGCTGTGGAACAGGACAAGAACACCCAG
GAGGTGTTTGCCCAGGTGAAGCAGATTTACAAGACACCTCC
AATCAAGGACTTTGGAGGCTTCAACTTCAGCCAGATTCTGC
CTGACCCAAGCAAGCCAAGCAAGAGGTCCTTCATTGAGGAC
CTGCTGTTCAACAAGGTGACCCTGGCTGATGCTGGCTTCAT
CAAGCAATATGGAGACTGTCTGGGAGACATTGCTGCCAGGG
ACCTGATTTGTGCCCAGAAGTTCAATGGACTGACAGTGCTG
CCTCCACTGCTGACAGATGAGATGATTGCCCAATACACCTC
TGCCCTGCTGGCTGGCACCATCACCTCTGGCTGGACCTTTG
GAGCAGGAGCAGCCCTCCAAATCCCATTTGCTATGCAGATG
GCTTACAGGTTCAATGGCATTGGAGTGACCCAGAATGTGCT
CTATGAGAACCAGAAACTGATTGCCAACCAGTTCAACTCTG
CCATTGGCAAGATTCAGGACTCCCTGTCCAGCACAGCCTCT
GCCCTGGGCAAACTCCAAGATGTGGTGAACCAGAATGCCCA
GGCTCTGAACACCCTGGTGAAGCAACTTTCCAGCAACTTTG
GAGCCATCTCCTCTGTGCTGAATGACATCCTGAGCAGACTG
GACAAGGTGGAGGCTGAGGTCCAGATTGACAGACTGATTAC
AGGCAGACTCCAATCCCTCCAAACCTATGTGACCCAACAAC
TTATCAGGGCTGCTGAGATTAGGGCATCTGCCAACCTGGCT
GCCACCAAGATGAGTGAGTGTGTGCTGGGACAAAGCAAGAG
GGTGGACTTCTGTGGCAAGGGCTACCACCTGATGAGTTTTC
CACAGTCTGCCCCTCATGGAGTGGTGTTCCTGCATGTGACC
TATGTGCCTGCCCAGGAGAAGAACTTCACCACAGCCCCTGC
CATCTGCCATGATGGCAAGGCTCACTTTCCAAGGGAGGGAG
TGTTTGTGAGCAATGGCACCCACTGGTTTGTGACCCAGAGG
AACTTCTATGAACCACAGATTATCACCACAGACAACACCTT
TGTGTCTGGCAACTGTGATGTGGTGATTGGCATTGTGAACA
ACACAGTCTATGACCCACTCCAACCTGAACTGGACTCCTTC
AAGGAGGAACTGGACAAATACTTCAAGAACCACACCAGCCC
TGATGTGGACCTGGGAGACATCTCTGGCATCAATGCCTCTG
TGGTGAACATCCAGAAGGAGATTGACAGACTGAATGAGGTG
GCTAAGAACCTGAATGAGTCCCTGATTGACCTCCAAGAACT
GGGCAAATATGAACAATACATCAAGTGGCCATGGTACATCT
GGCTGGGCTTCATTGCTGGACTGATTGCCATTGTGATGGTG
ACCATAATGCTGTGTTGTATGACCTCCTGTTGTTCCTGTCT
GAAAGGCTGTTGTTCCTGTGGCTCCTGTTGTAAGTTTGATG
AGGATGACTCTGAACCTGTGCTGAAAGGAGTGAAACTGCAC
TACACCTGA,

wherein nucleotides 1-2445 constitute the S1 subunit, nucleotides 2446-3822 constitute the S2 subunit, and nucleotides 2044-2055 (bolded) constitute the furin cleavage site. It will be appreciated that though the cDNA sequence is provided, the corresponding mRNA sequence encoding the spike protein is also expressly provided herein.

An exemplary amino acid sequence of a
SARS-CoV-2 wildtype (Wuhan-Hu-1) spike
protein is:
(SEQ ID NO: 2)
MFVFLVLLPLVSSQCVNLTTRTQLPPAYTNSFTRGVYYPD
KVFRSSVLHSTQDLFLPFFSNVTWFHAIHVSGTNGTKRFD
NPVLPFNDGVYFASTEKSNIIRGWIFGTTLDSKTQSLLIV
NNATNVVIKVCEFQFCNDPFLGVYYHKNNKSWMESEFRVY
SSANNCTFEYVSQPFLMDLEGKQGNFKNLREFVFKNIDGY
FKIYSKHTPINLVRDLPQGFSALEPLVDLPIGINITRFQT
LLALHRSYLTPGDSSSGWTAGAAAYYVGYLQPRTFLLKYN
ENGTITDAVDCALDPLSETKCTLKSFTVEKGIYQTSNFRV
QPTESIVRFPNITNLCPFGEVFNATRFASVYAWNRKRISN
CVADYSVLYNSASFSTFKCYGVSPTKLNDLCFTNVYADSF
VIRGDEVRQIAPGQTGKIADYNYKLPDDFTGCVIAWNSNN
LDSKVGGNYNYLYRLFRKSNLKPFERDISTEIYQAGSTPC
NGVEGFNCYFPLQSYGFQPTNGVGYQPYRVVVLSFELLHA
PATVCGPKKSTNLVKNKCVNFNFNGLTGTGVLTESNKKFL
PFQQFGRDIADTTDAVRDPQTLEILDITPCSFGGVSVITP
GTNTSNQVAVLYQDVNCTEVPVAIHADQLTPTWRVYSTGS
NVFQTRAGCLIGAEHVNNSYECDIPIGAGICASYQTQTNS
PRRARSVASQSIIAYTMSLGAENSVAYSNNSIAIPTNFTI
SVTTEILPVSMTKTSVDCTMYICGDSTECSNLLLQYGSFC
TQLNRALTGIAVEQDKNTQEVFAQVKQIYKTPPIKDFGGF
NFSQILPDPSKPSKRSFIEDLLFNKVTLADAGFIKQYGDC
LGDIAARDLICAQKFNGLTVLPPLLTDEMIAQYTSALLAG
TITSGWTFGAGAALQIPFAMQMAYRFNGIGVTQNVLYENQ
KLIANQFNSAIGKIQDSLSSTASALGKLQDVVNQNAQALN
TLVKQLSSNFGAISSVLNDILSRLDKVEAEVQIDRLITGR
LQSLQTYVTQQLIRAAEIRASANLAATKMSECVLGQSKRV
DFCGKGYHLMSFPQSAPHGVVFLHVTYVPAQEKNFTTAPA
ICHDGKAHFPREGVFVSNGTHWFVTQRNFYEPQIITTDNT
FVSGNCDVVIGIVNNTVYDPLQPELDSFKEELDKYFKNHT
SPDVDLGDISGINASVVNIQKEIDRLNEVAKNLNESLIDL
QELGKYEQYIKWPWYIWLGFIAGLIAIVMVTIMLCCMTSC
CSCLKGCCSCGSCCKFDEDDSEPVLKGVKLHYT,

wherein residues 13-685 constitute the S1 subunit, residues 686-1273 constitute the S2 subunit, and residues 682-685 (bolded) constitute the furin cleavage site.

An exemplary amino acid sequence of a MERS-CoV
wildtype spike protein is:
(SEQ ID NO: 3; UniProt ID: K9N5Q8)
MIHSVFLLMFLLTPTESYVDVGPDSVKSACIEVDIQQTFFDKTWPR
PIDVSKADGIIYPQGRTYSNITITYQGLFPYQGDHGDMYVYSAGHA
TGTTPQKLFVANYSQDVKQFANGFVVRIGAAANSTGTVIISPSTSA
TIRKIYPAFMLGSSVGNFSDGKMGRFFNHTLVLLPDGCGTLLRAFY
CILEPRSGNHCPAGNSYTSFATYHTPATDCSDGNYNRNASLNSFKE
YFNLRNCTFMYTYNITEDEILEWFGITQTAQGVHLFSSRYVDLYGG
NMFQFATLPVYDTIKYYSIIPHSIRSIQSDRKAWAAFYVYKLQPLT
FLLDFSVDGYIRRAIDCGFNDLSQLHCSYESFDVESGVYSVSSFEA
KPSGSVVEQAEGVECDFSPLLSGTPPQVYNFKRLVFTNCNYNLTKL
LSLFSVNDFTCSQISPAAIASNCYSSLILDYFSYPLSMKSDLSVSS
AGPISQFNYKQSFSNPTCLILATVPHNLTTITKPLKYSYINKCSRF
LSDDRTEVPQLVNANQYSPCVSIVPSTVWEDGDYYRKQLSPLEGGG
WLVASGSTVAMTEQLQMGFGITVQYGTDTNSVCPKLEFANDTKIAS
QLGNCVEYSLYGVSGRGVFQNCTAVGVRQQRFVYDAYQNLVGYYSD
DGNYYCLRACVSVPVSVIYDKETKTHATLFGSVACEHISSTMSQYS
RSTRSMLKRRDSTYGPLQTPVGCVLGLVNSSLFVEDCKLPLGQSLC
ALPDTPSTLTPRSVRSVPGEMRLASIAFNHPIQVDQLNSSYFKLSI
PTNFSFGVTQEYIQTTIQKVTVDCKQYVCNGFQKCEQLLREYGQFC
SKINQALHGANLRQDDSVRNLFASVKSSQSSPIIPGFGGDFNLTLL
EPVSISTGSRSARSAIEDLLFDKVTIADPGYMQGYDDCMQQGPASA
RDLICAQYVAGYKVLPPLMDVNMEAAYTSSLLGSIAGVGWTAGLSS
FAAIPFAQSIFYRLNGVGITQQVLSENQKLIANKFNQALGAMQTGF
TTTNEAFHKVQDAVNNNAQALSKLASELSNTFGAISASIGDIIQRL
DVLEQDAQIDRLINGRLTTLNAFVAQQLVRSESAALSAQLAKDKVN
ECVKAQSKRSGFCGQGTHIVSFVVNAPNGLYFMHVGYYPSNHIEVV
SAYGLCDAANPTNCIAPVNGYFIKTNNTRIVDEWSYTGSSFYAPEP
ITSLNTKYVAPQVTYQNISTNLPPPLLGNSTGIDFQDELDEFFKNV
STSIPNFGSLTQINTTLLDLTYEMLSLQQVVKALNESYIDLKELGN
YTYYNKWPWYIWLGFIAGLVALALCVFFILCCTGCGTNCMGKLKCN
RCCDRYEEYDLEPHKVHVH.
An exemplary amino acid sequence of a SARS-CoV
wildtype spike protein is:
(SEQ ID NO: 4; UniProt ID: P59594)
MFIFLLFLTLTSGSDLDRCTTFDDVQAPNYTQHTSSMRGVYYPDEI
FRSDTLYLTQDLFLPFYSNVTGFHTINHTFGNPVIPFKDGIYFAAT
EKSNVVRGWVFGSTMNNKSQSVIIINNSTNVVIRACNFELCDNPFF
AVSKPMGTQTHTMIFDNAFNCTFEYISDAFSLDVSEKSGNFKHLRE
FVFKNKDGFLYVYKGYQPIDVVRDLPSGFNTLKPIFKLPLGINITN
FRAILTAFSPAQDIWGTSAAAYFVGYLKPTTFMLKYDENGTITDAV
DCSQNPLAELKCSVKSFEIDKGIYQTSNFRVVPSGDVVRFPNITNL
CPFGEVFNATKFPSVYAWERKKISNCVADYSVLYNSTFFSTFKCYG
VSATKLNDLCFSNVYADSFVVKGDDVRQIAPGQTGVIADYNYKLPD
DFMGCVLAWNTRNIDATSTGNYNYKYRYLRHGKLRPFERDISNVPF
SPDGKPCTPPALNCYWPLNDYGFYTTTGIGYQPYRVVVLSFELLNA
PATVCGPKLSTDLIKNQCVNFNFNGLTGTGVLTPSSKRFQPFQQFG
RDVSDFTDSVRDPKTSEILDISPCSFGGVSVITPGTNASSEVAVLY
QDVNCTDVSTAIHADQLTPAWRIYSTGNNVFQTQAGCLIGAEHVDT
SYECDIPIGAGICASYHTVSLLRSTSQKSIVAYTMSLGADSSIAYS
NNTIAIPTNFSISITTEVMPVSMAKTSVDCNMYICGDSTECANLLL
QYGSFCTQLNRALSGIAAEQDRNTREVFAQVKQMYKTPTLKYFGGF
NFSQILPDPLKPTKRSFIEDLLFNKVTLADAGFMKQYGECLGDINA
RDLICAQKFNGLTVLPPLLTDDMIAAYTAALVSGTATAGWTFGAGA
ALQIPFAMQMAYRFNGIGVTQNVLYENQKQIANQFNKAISQIQESL
TTTSTALGKLQDVVNQNAQALNTLVKQLSSNFGAISSVLNDILSRL
DKVEAEVQIDRLITGRLQSLQTYVTQQLIRAAEIRASANLAATKMS
ECVLGQSKRVDFCGKGYHLMSFPQAAPHGVVFLHVTYVPSQERNFT
TAPAICHEGKAYFPREGVFVFNGTSWFITQRNFFSPQIITTDNTFV
SGNCDVVIGIINNTVYDPLQPELDSFKEELDKYFKNHTSPDVDLGD
ISGINASVVNIQKEIDRLNEVAKNLNESLIDLQELGKYEQYIKWPW
YVWLGFIAGLIAIVMVTILLCCMTSCCSCLKGACSCGSCCKFDEDD
SEPVLKGVKLHYT.
An exemplary amino acid sequence of a
SARS-CoV-2 B.1.351 spike protein con-
taining six stabilizing proline substi-
tutions (shown in bold underline) is:
(SEQ ID NO: 5)
MFVFLVLLPLVSSQCVNFTTRTQLPPAYTNSFTRGVYYPDKVFRSS
VLHSTQDLFLPFFSNVTWFHAIHVSGTNGTKRFANPVLPFNDGVYF
ASTEKSNIIRGWIFGTTLDSKTQSLLIVNNATNVVIKVCEFQFCND
PFLGVYYHKNNKSWMESEFRVYSSANNCTFEYVSQPFLMDLEGKQG
NFKNLREFVFKNIDGYFKIYSKHTPINLVRGLPQGFSALEPLVDLP
IGINITRFQTLLALHISYLTPGDSSSGWTAGAAAYYVGYLQPRTFL
LKYNENGTITDAVDCALDPLSETKCTLKSFTVEKGIYQTSNFRVQP
TESIVRFPNITNLCPFGEVFNATRFASVYAWNRKRISNCVADYSVL
YNSASFSTFKCYGVSPTKLNDLCFTNVYADSFVIRGDEVRQIAPGQ
TGNIADYNYKLPDDFTGCVIAWNSNNLDSKVGGNYNYLYRLFRKSN
LKPFERDISTEIYQAGSTPCNGVKGFNCYFPLQSYGFQPTYGVGYQ
PYRVVVLSFELLHAPATVCGPKKSTNLVKNKCVNFNFNGLTGTGVL
TESNKKFLPFQQFGRDIADTTDAVRDPQTLEILDITPCSFGGVSVI
TPGTNTSNQVAVLYQDVNCTEVPVAIHADQLTPTWRVYSTGSNVFQ
TRAGCLIGAEHVNNSYECDIPIGAGICASYQTQTNSPGSASSVASQ
SIIAYTMSLGVENSVAYSNNSIAIPTNFTISVTTEILPVSMTKTSV
DCTMYICGDSTECSNLLLQYGSFCTQLNRALTGIAVEQDKNTQEVF
AQVKQIYKTPPIKDFGGFNFSQILPDPSKPSKRSPIEDLLFNKVTL
ADAGFIKQYGDCLGDIAARDLICAQKFNGLTVLPPLLTDEMIAQYT
SALLAGTITSGWTFGAGPALQIPFPMQMAYRFNGIGVTQNVLYENQ
KLIANQFNSAIGKIQDSLSSTPSALGKLQDVVNQNAQALNTLVKQL
SSNFGAISSVLNDILSRLDPPEAEVQIDRLITGRLQSLQTYVTQQL
IRAAEIRASANLAATKMSECVLGQSKRVDFCGKGYHLMSFPQSAPH
GVVFLHVTYVPAQEKNFTTAPAICHDGKAHFPREGVFVSNGTHWFV
TQRNFYEPQIITTDNTFVSGNCDVVIGIVNNTVYDPLQPELDSFKE
ELDKYFKNHTSPDVDLGDISGINASVVNIQKEIDRLNEVAKNLNES
LIDLQELGKYEQYIKWPWYIWLGFIAGLIAIVMVTIMLCCMTSCCS
CLKGCCSCGSCCKFDEDDSEPVLKGVKLHYT,

wherein residues 13-685 constitute the S1 subunit, residues 686-1273 constitute the S2 subunit, and residues 682-685 (bolded) constitute the mutated furin cleavage site.

An exemplary amino acid sequence of a
SARS-CoV-2 B.1.617 spike protein con-
taining six stabilizing proline substi-
tutions (shown in bold underline) is:
(SEQ ID NO: 6)
MFVFLVLLPLVSSQCVNLTTRTQLPPAYTNSFTRGVYYPDKVFRSS
VLHSTQDLFLPFFSNVTWFHAIHVSGTNGTKRFDNPVLPFNDGVYF
ASTEKSNIIRGWIFGTTLDSKTQSLLIVNNATNVVIKVCEFQFCND
PFLDVYYHKNNKSWMKSEFRVYSSANNCTFEYVSQPFLMDLEGKQG
NFKNLREFVFKNIDGYFKIYSKHTPINLVRDLPQGFSALEPLVDLP
IGINITRFQTLLALHRSYLTPGDSSSGWTAGAAAYYVGYLQPRTFL
LKYNENGTITDAVDCALDPLSETKCTLKSFTVEKGIYQTSNFRVQP
TESIVRFPNITNLCPFGEVFNATRFASVYAWNRKRISNCVADYSVL
YNSASFSTFKCYGVSPTKLNDLCFTNVYADSFVIRGDEVRQIAPGQ
TGKIADYNYKLPDDFTGCVIAWNSNNLDSKVGGNYNYRYRLFRKSN
LKPFERDISTEIYQAGSTPCNGVQGFNCYFPLQSYGFQPTNGVGYQ
PYRVVVLSFELLHAPATVCGPKKSTNLVKNKCVNFNFNGLTGTGVL
TESNKKFLPFQQFGRDIADTTDAVRDPQTLEILDITPCSFGGVSVI
TPGTNTSNQVAVLYQGVNCTEVPVAIHADQLTPTWRVYSTGSNVFQ
TRAGCLIGAEHVNNSYECDIPIGAGICASYQTQTNSRGSASSVASQ
SIIAYTMSLGAENSVAYSNNSIAIPTNFTISVTTEILPVSMTKTSV
DCTMYICGDSTECSNLLLQYGSFCTQLNRALTGIAVEQDKNTQEVF
AQVKQIYKTPPIKDFGGFNFSQILPDPSKPSKRSPIEDLLFNKVTL
ADAGFIKQYGDCLGDIAARDLICAQKFNGLTVLPPLLTDEMIAQYT
SALLAGTITSGWTFGAGPALQIPFPMQMAYRFNGIGVTQNVLYENQ
KLIANQFNSAIGKIQDSLSSTPSALGKLQDVVNQNAQALNTLVKQL
SSNFGAISSVLNDILSRLDPPEAEVQIDRLITGRLQSLQTYVTQQL
IRAAEIRASANLAATKMSECVLGQSKRVDFCGKGYHLMSFPQSAPH
GVVFLHVTYVPAHEKNFTTAPAICHDGKAHFPREGVFVSNGTHWFV
TQRNFYEPQIITTDNTFVSGNCDVVIGIVNNTVYDPLQPELDSFKE
ELDKYFKNHTSPDVDLGDISGINASVVNIQKEIDRLNEVAKNLNES
LIDLQELGKYEQYIKWPWYIWLGFIAGLIAIVMVTIMLCCMTSCCS
CLKGCCSCGSCCKFDEDDSEPVLKGVKLHYT,

wherein residues 13-685 constitute the S1 subunit, residues 686-1273 constitute the S2 subunit, and residues 682-685 (bolded) constitute the mutated furin cleavage site.

An exemplary amino acid sequence of a
SARS-CoV-2 B.1.617.2 spike protein con-
taining six stabilizing proline substi
tutions (shown in bold underline) is:
(SEQ ID NO: 7)
MFVFLVLLPLVSSQCVNLRTRTQLPPAYTNSFTRGVYYPDKVFRSS
VLHSTQDLFLPFFSNVTWFHAIHVSGTNGTKRFDNPVLPFNDGVYF
ASTEKSNIIRGWIFGTTLDSKTQSLLIVNNATNVVIKVCEFQFCND
PFLDVYYHKNNKSWMESGVYSSANNCTFEYVSQPFLMDLEGKQGNF
KNLREFVFKNIDGYFKIYSKHTPINLVRDLPQGFSALEPLVDLPIG
INITRFQTLLALHRSYLTPGDSSSGWTAGAAAYYVGYLQPRTFLLK
YNENGTITDAVDCALDPLSETKCTLKSFTVEKGIYQTSNFRVQPTE
SIVRFPNITNLCPFGEVFNATRFASVYAWNRKRISNCVADYSVLYN
SASFSTFKCYGVSPTKLNDLCFTNVYADSFVIRGDEVRQIAPGQTG
KIADYNYKLPDDFTGCVIAWNSNNLDSKVGGNYNYRYRLFRKSNLK
PFERDISTEIYQAGSKPCNGVEGFNCYFPLQSYGFQPTNGVGYQPY
RVVVLSFELLHAPATVCGPKKSTNLVKNKCVNFNFNGLTGTGVLTE
SNKKFLPFQQFGRDIADTTDAVRDPQTLEILDITPCSFGGVSVITP
GTNTSNQVAVLYQGVNCTEVPVAIHADQLTPTWRVYSTGSNVFQTR
AGCLIGAEHVNNSYECDIPIGAGICASYQTQTNSRGSASSVASQSI
IAYTMSLGAENSVAYSNNSIAIPTNFTISVTTEILPVSMTKTSVDC
TMYICGDSTECSNLLLQYGSFCTQLNRALTGIAVEQDKNTQEVFAQ
VKQIYKTPPIKDFGGFNFSQILPDPSKPSKRSPIEDLLFNKVTLAD
AGFIKQYGDCLGDIAARDLICAQKFNGLTVLPPLLTDEMIAQYTSA
LLAGTITSGWTFGAGPALQIPFPMQMAYRFNGIGVTQNVLYENQKL
IANQFNSAIGKIQDSLSSTPSALGKLQNVVNQNAQALNTLVKQLSS
NFGAISSVLNDILSRLDPPEAEVQIDRLITGRLQSLQTYVTQQLIR
AAEIRASANLAATKMSECVLGQSKRVDFCGKGYHLMSFPQSAPHGV
VFLHVTYVPAQEKNFTTAPAICHDGKAHFPREGVFVSNGTHWFVTQ
RNFYEPQIITTDNTFVSGNCDVVIGIVNNTVYDPLQPELDSFKEEL
DKYFKNHTSPDVDLGDISGINASVVNIQKEIDRLNEVAKNLNESLI
DLQELGKYEQYIKWPWYIWLGFIAGLIAIVMVTIMLCCMTSCCSCL
KGCCSCGSCCKFDEDDSEPVLKGVKLHYT,

wherein residues 13-685 constitute the S1 subunit, residues 686-1271 constitute the S2 subunit, and residues 680-683 (bolded) constitute the mutated furin cleavage site.

An exemplary amino acid sequence of a
SARS-CoV-2 B.1.1.7 spike protein con-
taining six stabilizing proline substi-
tutions is:
(SEQ ID NO: 8)
MFVFLVLLPLVSSQCVNLTTRTQLPPAYTNSFTRGVYYPDKVFRSS
VLHSTQDLFLPFFSNVTWFHAISGTNGTKRFDNPVLPFNDGVYFAS
TEKSNIIRGWIFGTTLDSKTQSLLIVNNATNVVIKVCEFQFCNDPF
LGVYHKNNKSWMESEFRVYSSANNCTFEYVSQPFLMDLEGKQGNFK
NLREFVFKNIDGYFKIYSKHTPINLVRDLPQGFSALEPLVDLPIGI
NITRFQTLLALHRSYLTPGDSSSGWTAGAAAYYVGYLQPRTFLLKY
NENGTITDAVDCALDPLSETKCTLKSFTVEKGIYQTSNFRVQPTES
IVRFPNITNLCPFGEVFNATRFASVYAWNRKRISNCVADYSVLYNS
ASFSTFKCYGVSPTKLNDLCFTNVYADSFVIRGDEVRQIAPGQTGK
IADYNYKLPDDFTGCVIAWNSNNLDSKVGGNYNYLYRLFRKSNLKP
FERDISTEIYQAGSTPCNGVEGFNCYFPLQSYGFQPTYGVGYQPYR
VVVLSFELLHAPATVCGPKKSTNLVKNKCVNFNFNGLTGTGVLTES
NKKFLPFQQFGRDIDDTTDAVRDPQTLEILDITPCSFGGVSVITPG
TNTSNQVAVLYQDVNCTEVPVAIHADQLTPTWRVYSTGSNVFQTRA
GCLIGAEHVNNSYECDIPIGAGICASYQTQTNSHRRARSVASQSII
AYTMSLGAENSVAYSNNSIAIPINFTISVTTEILPVSMTKTSVDCT
MYICGDSTECSNLLLQYGSFCTQLNRALTGIAVEQDKNTQEVFAQV
KQIYKTPPIKDFGGFNFSQILPDPSKPSKRSFIEDLLFNKVTLADA
GFIKQYGDCLGDIAARDLICAQKFNGLTVLPPLLTDEMIAQYTSAL
LAGTITSGWTFGAGAALQIPFAMQMAYRFNGIGVTQNVLYENQKLI
ANQFNSAIGKIQDSLSSTASALGKLQDVVNQNAQALNTLVKQLSSN
FGAISSVLNDILARLDKVEAEVQIDRLITGRLQSLQTYVTQQLIRA
AEIRASANLAATKMSECVLGQSKRVDFCGKGYHLMSFPQSAPHGVV
FLHVTYVPAQEKNFTTAPAICHDGKAHFPREGVFVSNGTHWFVTQR
NFYEPQIITTHNTFVSGNCDVVIGIVNNTVYDPLQPELDSFKEELD
KYFKNHTSPDVDLGDISGINASVVNIQKEIDRLNEVAKNLNESLID
LQELGKYEQYIKWPWYIWLGFIAGLIAIVMVTIMLCCMTSCCSCLK
GCCSCGSCCKFDEDDSEPVLKGVKLHYT.
An exemplary amino acid sequence of a
SARS-CoV spike protein containing six
stabilizing proline substitutions
(shown in bold underline) is:
(SEQ ID NO: 9)
MFIFLLFLTLTSGSDLDRCTTFDDVQAPNYTQHTSSMRGVYYPDEI
FRSDTLYLTQDLFLPFYSNVTGFHTINHTFDNPVIPFKDGIYFAAT
EKSNVVRGWVFGSTMNNKSQSVIIINNSTNVVIRACNFELCDNPFF
AVSKPMGTQTHTMIFDNAFNCTFEYISDAFSLDVSEKSGNFKHLRE
FVFKNKDGFLYVYKGYQPIDVVRDLPSGFNTLKPIFKLPLGINITN
FRAILTAFSPAQDTWGTSAAAYFVGYLKPTTFMLKYDENGTITDAV
DCSQNPLAELKCSVKSFEIDKGIYQTSNFRVVPSGDVVRFPNITNL
CPFGEVFNATKFPSVYAWERKKISNCVADYSVLYNSTFFSTFKCYG
VSATKLNDLCFSNVYADSFVVKGDDVRQIAPGQTGVIADYNYKLPD
DFMGCVLAWNTRNIDATSTGNYNYKYRYLRHGKLRPFERDISNVPF
SPDGKPCTPPALNCYWPLNDYGFYTTTGIGYQPYRVVVLSFELLNA
PATVCGPKLSTDLIKNQCVNFNFNGLTGTGVLTPSSKRFQPFQQFG
RDVSDFTDSVRDPKTSEILDISPCSFGGVSVITPGTNASSEVAVLY
QDVNCTDVSTAIHADQLTPAWRIYSTGNNVFQTQAGCLIGAEHVDT
SYECDIPIGAGICASYHTVSLLRSTSQKSIVAYTMSLGADSSIAYS
NNTIAIPTNFSISITTEVMPVSMAKTSVDCNMYICGDSTECANLLL
QYGSFCTQLNRALSGIAAEQDRNTREVFAQVKQMYKTPTLKYFGGF
NFSQILPDPLKPTKRSPIEDLLFNKVTLADAGFMKQYGECLGDINA
RDLICAQKFNGLTVLPPLLTDDMIAAYTAALVSGTATAGWTFGAGP
ALQIPFPMQMAYRFNGIGVTQNVLYENQKQIANQFNKAISQIQESL
TTTPTALGKLQDVVNQNAQALNTLVKQLSSNFGAISSVLNDILSRL
DPPEAEVQIDRLITGRLQSLQTYVTQQLIRAAEIRASANLAATKMS
ECVLGQSKRVDFCGKGYHLMSFPQAAPHGVVFLHVTYVPSQERNFT
TAPAICHEGKAYFPREGVFVFNGTSWFITQRNFFSPQIITTDNTFV
SGNCDVVIGIINNTVYDPLQPELDSFKEELDKYFKNHTSPDVDLGD
ISGINASVVNIQKEIDRLNEVAKNLNESLIDLQELGKYEQYIKWPW
YVWLGFIAGLIAIVMVTILLCCMTSCCSCLKGACSCGSCCKFDEDD
SEPVLKGVKLHYT,

wherein residues 14-667 constitute the S1 subunit and residues 668-1255 constitute the S2 subunit.

[0157] An exemplary amino acid sequence of a MERS-CoV spike protein containing six stabilizing proline substitutions (shown in bold underline) is: MIHSVFLLMFLLTPTESYVDVGPDSVKSACIEVDIQQTFFDKTWPRPIDVSKADGIIYPQGRTYSNIT ITYQGLFPYQGDHGDMYVYSAGHATGTTPQKLFVANYSQDVKQFANGEVVRIGAAANSTGTVIISPST SATIRKIYPAFMLGSSVGNFSDGKMGRFFNHTLVLLPDGCGTLLRAFYCILEPRSGNHCPAGNSYTSF ATYHTPATDCSDGNYNRNASLNSFKEYFNLRNCTEMYTYNITEDEILEWFGITQTAQGVHLESSRYVD LYGGNMFQFATLPVYDTIKYYSIIPHSIRSIQSDRKAWAAFYVYKLQPLTFLLDFSVDGYIRRAIDCG FNDLSQLHCSYESFDVESGVYSVSSFEAKPSGSVVEQAEGVECDESPLLSGTPPQVYNEKRLVFTNCN YNLTKLLSLESVNDFTCSQISPAAIASNCYSSLILDYFSYPLSMKSDLSVSSAGPISQFNYKQSFSNP TCLILATVPHNLTTITKPLKYSYINKCSRLLSDDRTEVPQLVNANQYSPCVSIVPSTVWEDGDYYRKQ LSPLEGGGWLVASGSTVAMTEQLQMGFGITVQYGTDTNSVCPKLEFANDTKIASQLGNCVEYSLYGVS GRGVFQNCTAVGVRQQRFVYDAYQNLVGYYSDDGNYYCLRACVSVPVSVIYDKETKTHATLFGSVACE HISSTMSQYSRSTRSMLKRRDSTYGPLQTPVGCVLGLVNSSLFVEDCKLPLGQSLCALPDTPSTLTPR SVRSVPGEMRLASIAFNHPIQVDQLNSSYFKLSIPTNFSFGVTQEYIQTTIQKVTVDCKQYVCNGFQK CEQLLREYGQFCSKINQALHGANLRQDDSVRNLFASVKSSQSSPIIPGFGGDENLILLEPVSISTGSR SARSPIEDLLEDKVTIADPGYMQGYDDCMQQGPASARDLICAQYVAGYKVLPPLMDVNMEAAYTSSLL GSIAGVGWTAGLSPFAAIPFPQSIFYRLNGVGITQQVLSENQKLIANKENQALGAMQTGFTTTPEAFQ KVQDAVNNNAQALSKLASELSNTFGAISASIGDIIQRLDPPEQDAQIDRLINGRLTTLNAFVAQQLVR SESAALSAQLAKDKVNECVKAQSKRSGFCGQGTHIVSFVVNAPNGLYFMHVGYYPSNHIEVVSAYGLC DAANPTNCIAPVNGYFIKTNNTRIVDEWSYTGSSFYAPEPITSLNTKYVAPQVTYQNISTNLPPPLLG NSTGIDFQDELDEFFKNVSTSIPNFGSLTQINTTLLDLTYEMLSLQQVVKALNESYIDLKELGNYTYY NKWPWYIWLGFIAGLVALALCVFFILCC (SEQ ID NO: 10), wherein residues 49-658 constitute the S1 subunit and residues 779-1353 constitute the S2 subunit.

[0158] Mutations in the spike protein that define a variant/strain from its corresponding native (wildtype) virus are known in the art. For example, the SARS-CoV-2 B.1.351 strain can include one or more mutations at residues selected from L18, D80, D215, R246, K417, E484, N501, D614 and A701 in the spike protein relative to a wildtype SARS-CoV-2 spike protein (e.g., SEQ ID NO:2). In certain non-limiting embodiments, the SARS-CoV-2 B.1.351 strain includes one or more mutations from L18F, D80A, D215G, R246I, K417N, E484K, N501Y, D614G and A701V in the spike protein relative to a wildtype SARS-CoV-2 spike protein (e.g., SEQ ID NO:2). In certain embodiments, the SARS-CoV-2 B.1.351 strain includes all nine foregoing mutations in the spike protein relative to a wildtype SARS-CoV-2 spike protein (e.g., SEQ ID NO:2). Thus, In certain non-limiting embodiments, the open reading frame encodes a spike protein or subunit or other fragment thereof that includes one or more mutations at residues L18, D80, D215, R246, K417, E484, N501, D614 and A701, such as but not limited to one or more mutations selected from L18F, D80A, D215G, R246I, K417N, E484K, N501Y, D614G and A701V relative to a wildtype SARS-CoV-2 spike protein (e.g., SEQ ID NO:2).

[0159] The SARS-CoV-2 B.1.617 strain can include one or more mutations at residues selected from G142, E154, L452, E484, D614, P681, and Q1071 in the spike protein relative to a wildtype SARS-CoV-2 spike protein (e.g., SEQ ID NO:2). In certain non-limiting embodiments, the SARS-CoV-2 B.1.617 strain includes one or more mutations selected from G142D, E154K, L452R, E484Q, D614G, P681R, and Q1071H in the spike protein relative to a wildtype SARS-CoV-2 spike protein (e.g., SEQ ID NO:2). In certain embodiments, the SARS-CoV-2 B.1.617 strain includes all seven foregoing mutations in the spike protein relative to a wildtype SARS-CoV-2 spike protein (e.g., SEQ ID NO:2). Thus, In certain non-limiting embodiments, the open reading frame encodes a spike protein or subunit or other fragment thereof that includes one or more mutations at residues G142, E154, L452, E484, D614, P681, and Q1071, such as but not limited to one or more mutations selected from G142D, E154K, L452R, E484Q, D614G, P681R, and Q1071H relative to a wildtype SARS-CoV-2 spike protein (e.g., SEQ ID NO:2).

[0160] The encoded spike proteins or subunits or other fragments thereof can also have one or more mutations that stabilize the spike protein in a prefusion conformation. A spike protein “stabilized in a prefusion conformation” can include one or more amino acid substitutions, deletions, or insertions compared to a native coronavirus spike sequence that provide for increased retention of the prefusion conformation compared to coronavirus spike formed from a corresponding native coronavirus spike protein sequence. The stabilization of the prefusion conformation can be, for example, energetic stabilization (e.g., reducing the energy of the prefusion conformation relative to the post-fusion open conformation) and/or kinetic stabilization (for example, reducing the rate of transition from the prefusion conformation to the post-fusion conformation). Additionally, stabilization of the spike in the prefusion conformation can include an increase in resistance to denaturation compared to a corresponding native coronavirus spike protein sequence. Methods of determining if a coronavirus spike protein is in the prefusion conformation include, but are not limited to, negative-stain electron microscopy and antibody binding assays using a prefusion-conformation-specific antibody.

[0161] In certain embodiments, the open reading frame encodes a spike protein or subunit or other fragment thereof that includes one or more mutations that stabilize the spike protein in a prefusion conformation. Typically, the one or more mutations include one or more proline substitutions. In certain embodiments, the one or more proline substitutions are in the spike S2 subunit.

[0162] In certain non-limiting embodiments when the virus is a SARS-CoV-2, suitable proline substitutions can be selected from F817P, A892P, A899P, A942P, K986P, V987P, and combinations thereof. In a particular form, the encoded spike protein or subunit or other fragment thereof contains two mutations selected from F817P, A892P, A899P, A942P, K986P, V987P. For example, in a particular form, the encoded spike protein or subunit or other fragment thereof contains the following two mutations: K986P and V987P. In a particular form, the encoded spike protein or subunit or other fragment thereof contains four mutations selected from F817P, A892P, A899P, A942P, K986P, V987P. In some certain embodiments, the encoded spike protein or subunit or other fragment thereof contains all six mutations selected from F817P, A892P, A899P, A942P, K986P, V987P. In certain non-limiting embodiments, the aforementioned mutations are indicated relative to a wildtype SARS-CoV-2 spike protein sequence, such as the sequence set forth in SEQ ID NO:2.

[0163] In certain non-limiting embodiments, when the virus is a MERS-CoV, suitable proline substitutions can be selected from A889P, S966P, A973P, N1016P, V1060P, L1061P and combinations thereof. In certain non-limiting embodiments, the encoded spike protein or subunit or other fragment thereof contains two mutations selected from A889P, S966P, A973P, N1016P, V1060P, and L1061P. For example, in a particular form, the encoded spike protein or subunit or other fragment thereof contains two such mutations: V1060P and L1061P. In certain non-limiting embodiments, the encoded spike protein or subunit or other fragment thereof contains four mutations selected from A889P, S966P, A973P, N1016P, V1060P, and L1061P. In some certain embodiments, the encoded spike protein or subunit or other fragment thereof contains all six mutations selected from A889P, S966P, A973P, N1016P, V1060P, and L1061P. In certain non-limiting embodiments, the aforementioned mutations are indicated relative to a wildtype MERS-CoV spike protein sequence, such as the sequence set forth in SEQ ID NO:3.

[0164] In certain non-limiting embodiments, when the virus is a SARS-CoV, suitable proline substitutions can be selected from F799P, A874P, A881P, S924P, K968P, V969P and combinations thereof. In certain non-limiting embodiments, the encoded spike protein or subunit or other fragment thereof contains two mutations selected from F799P, A874P, A881P, S924P, K968P, and V969P. In certain non-limiting embodiments, the encoded spike protein or subunit or other fragment thereof contains four mutations selected from F799P, A874P, A881P, S924P, K968P, and V969P. In some certain embodiments, the encoded spike protein or subunit or other fragment thereof contains all six mutations selected from F799P, A874P, A881P, S924P, K968P, and V969P. In certain non-limiting embodiments, the aforementioned mutations are indicated relative to a wildtype SARS-CoV spike protein sequence, such as the sequence set forth in SEQ ID NO:4.

[0165] Additionally, or alternatively, the encoded spike protein or subunit or other fragment thereof can include one or more mutations at a protease cleavage site, such as an S1/S2 and/or S2′ protease cleavage site. In certain non-limiting embodiments, cleavage site mutations can inhibit protease cleavage of the spike protein. The protease cleavage site can be a furin cleavage site. An exemplary furin cleavage site is RRAR (SEQ ID NO:15). In certain non-limiting embodiments, the furin cleavage site is deleted or replaced with a different sequence. For example, the furin cleavage site can be replaced with GSAS (SEQ ID NO: 11). Alternatively, other flexible linkers can be used, such as GSSS (SEQ ID NO:16) or GSGS (SEQ ID NO:17).

[0166] In certain non-limiting embodiments, the open reading encodes a spike protein or subunit or other fragment thereof linked to a trimerization domain to promote trimerization of the spike protein or subunit or other fragment, and to stabilize the membrane proximal aspect of the spike protein or subunit or other fragment in a trimeric configuration. In certain non-limiting embodiments, the spike protein or subunit or other fragment thereof is linked to the trimerization domain at the C-terminus. Non-limiting examples of multimerization domains that promote stable trimers of soluble recombinant proteins include: the GCN4 leucine zipper (Harbury et al. 1993 Science 262:1401-1407), the trimerization motif from the lung surfactant protein (Hoppe et al. 1994 FEBS Lett 344:191-195), collagen (McAlinden et al. 2003 J Biol Chem 278:42200-42207), and the phage T4 fibritin Foldon (Miroshnikov et al. 1998 Protein Eng 11:329-414), any of which can be linked to a disclosed spike protein or subunit or other fragment (e.g., by linkage to the C-terminus of S2) to promote trimerization of the spike protein or subunit or other fragment. In some examples, the C-terminus of the S2 subunit of the spike protein can be linked to a T4 fibritin Foldon domain. In certain non-limiting embodiments, the T4 fibritin Foldon domain includes the amino acid sequence GYIPEAPRDGQAYVRKDGEWVLLSTF (SEQ ID NO:12), which adopts a β-propeller conformation, and can fold and trimerize in an autonomous way (Tao et al. 1997 Structure 5:789-798). Optionally, the heterologous trimerization domain can be connected to the spike protein or subunit or other fragment thereof via a peptide linker, such as an amino acid linker. Non-limiting examples of peptide linkers that can be used include glycine, serine, and glycine-serine linkers.

[0167] In some certain embodiments, the mRNA encodes a chimeric (hybrid) protein or subunit or other fragment thereof which has sequences from different viral species or variants. The different viral species or variants can be selected from any coronavirus known in the art or disclosed herein, and include, for example, SARS-CoV, MERS-CoV, SARS-CoV-2, and variants of each of the foregoing such as SARS-CoV-2 B.1.1.7, SARS-CoV-2 B.1.351 (including B.1.351.2 and B.1.351.3), SARS-CoV-2 B.1.617 (including B.1.617.1, B.1.617.2, and SARS-CoV-2 B.1.617.3), P.1, P.1.1, P.1.2, B.1.427, B.1.429, B.1.525, B.1.526, P.2, B.1.621, and B.1.621.1.

[0168] For example, a chimeric protein can include two or more spike proteins or subunits or other fragments thereof (in frame with each other) from distinct coronavirus species or variants. In certain non-limiting embodiments, a disclosed chimeric protein contains a first spike protein or subunit or other fragment thereof (e.g., ECD, S1, S2, NTD, RBD) of a coronavirus selected from SARS-CoV, MERS-CoV, SARS-CoV-2 and variants thereof, and a second spike protein or subunit or other fragment thereof (e.g., ECD, S1, S2, NTD, RBD) of a coronavirus selected from SARS-CoV, MERS-CoV, SARS-CoV-2 and variants thereof. In certain non-limiting embodiments, the first spike protein or subunit or other fragment thereof is from a different viral species or variant from the second spike protein or subunit or other fragment thereof. In some certain embodiments, the chimeric protein does not contain a linker or other domain intervening between the two spike proteins or subunits or other fragments thereof from distinct coronavirus species or variants.

[0169] Non-limiting examples of chimeric proteins include, a chimeric protein having an S1 subunit from SARS-CoV-2 B.1.351 and an S2 subunit from SARS-CoV-2 B.1.617 (e.g., B.1.617.2 or B.1.617.3), a chimeric protein having an S1 subunit from SARS-CoV and an S2 subunit from SARS-CoV-2 (e.g., native/wildtype, B.1.1.7, B.1.351, B.1.617.2, B.1.617.3), a chimeric protein having an S1 subunit from MERS-CoV and an S2 subunit from SARS-CoV-2 (e.g., native/wildtype, B.1.1.7, B.1.351, B.1.617.2, B.1.617.3), and a chimeric protein having an S1 subunit from MERS-CoV and an S2 subunit from SARS-CoV. Also disclosed are variants of the foregoing in which the viral species or strains from which the S1 and S2 subunits are derived are reversed. It is to be understood that while the foregoing examples describe S1 and S2 subunits, In certain non-limiting embodiments, the S1 and/or S2 subunits can be substituted with other spike proteins or subunits or other fragment thereof (e.g., ECD, NTD, RBD). Thus, other examples of chimeric proteins include also include chimeric proteins of SARS-CoV-2 spike (e.g., native/wildtype, B.1.1.7, B.1.351, B.1.617.2, B.1.617.3, or other variants) in which the RBD (R319-F541) is replaced by MERS-CoV RBD (E367-Y606) or SARS-CoV RBD (R306-F527). In any of the foregoing, the S2 subunit can include one or more mutations, such as the proline substitutions described above, that stabilize the spike protein in a prefusion conformation.

[0170] Different peptide ligation approaches (e.g., SpyCatcher-SpyTag, SpyCatcher002-SpyTag002, SpyCatcher003-SpyTag003, SpyLigase-SpyTag, SpyLigase-KTag, SnoopCatcher-SnoopTag, SnoopLigase-SnoopTagJr, SnoopLigase-DogTag, SpyDock-SpyTag002) can be used to generate the disclosed chimeric proteins. In certain non-limiting embodiments, each spike protein or subunit or other fragment thereof contains a SPY tag/catcher sequence positioned at the N-terminus or C-terminus. The SpyCatcher-SpyTag system was developed as a method for protein ligation. It is based on a modified domain from a Streptococcus pyogenes surface protein (SpyCatcher), which recognizes a cognate 13-amino-acid peptide (SpyTag). Upon recognition, the two form a covalent isopeptide bond between the side chains of a lysine in SpyCatcher and an aspartate in SpyT (Hatlem D., et al., Int J Mol Sci., 20 (9): 2129 (2019)). An internal isopeptide bond forms spontaneously between the ε-amine of lysine and the side chain carboxyl of aspartic acid. The reaction is catalyzed by the spatially adjacent glutamate. The resulting isopeptide bond confers high stability. SpyCatcher contains the reactive lysine and catalytic glutamate, whereas SpyTag includes the reactive aspartate. The two components recognize each other with high affinity and the isopeptide can form between SpyCatcher and SpyTag to form a covalently bound complex. Under experimental conditions relevant to life science research (room temperature, dilute protein concentrations), the reaction rates allow the bonds to form at high efficiency within minutes (Hatlem D., et al., 2019). This technology has been used, among other applications, to create covalently stabilized multi-protein complexes, for modular vaccine production, and to label proteins (e.g., for microscopy). The SpyTag system is versatile as the tag is a short, unfolded peptide that can be genetically fused to exposed positions in target proteins; similarly, SpyCatcher can be fused to reporter proteins such as GFP, and to epitope or purification tags.

An exemplary amino acid sequence of SPY tag is
(SEQ ID NO: 13)
RGVPHIVMVDAYKRYK.
An exemplary amino acid sequence of SPY catcher is
(SEQ ID NO: 14)
VTTLSGLSGEQGPSGDMTTEEDSATHIKESKRDEDGRELAGATMELRDSS
GKTISTWISDGHVKDFYLYPGKYTFVETAAPDGYEVATPIEFTVNEDGQV
TVDGEATEGDAHT.

[0171] In certain non-limiting embodiments, one component of the chimeric protein (e.g., S1) contains a SPY tag (e.g., SEQ ID NO:13) positioned at its C-terminus and a second component (e.g., S2) contains a SPY catcher (e.g., SEQ ID NO:14) positioned at its N-terminus. In certain non-limiting embodiments, one component of the chimeric protein (e.g., S1) contains a SPY tag (e.g., SEQ ID NO:13) positioned at its N-terminus and a second component (e.g., S2) contains a SPY catcher (e.g., SEQ ID NO:14) positioned at its C-terminus. In certain non-limiting embodiments, the chimeric protein is formed by covalent attachment of the two components mediated by SPY tag and SPY catcher (see, e.g., FIGS. 9-10) or alternative ligation system. It will be appreciated that the components of the chimeric protein can be different spike proteins or subunits thereof including ECD, S1, S2, NTD, and/or RBD.

[0172] Also disclosed are variants of any of the encoded proteins or peptides described herein (e.g., a spike protein or subunit or other fragment thereof). For example, the mRNA can include an open reading frame that encodes a variant of any of the disclosed spike proteins or subunits or other fragments thereof. In certain non-limiting embodiments, suitable encoded polypeptides include variants of any one of SEQ ID NOs: 2-10 having, for example, at least 70%, 75%, 80%, 85%, 90%, 95%, 96%, 97%, 98%, 99%, or more sequence identity to any one of SEQ ID NOs: 2-10.

[0173] Suitable variants can include at least one point mutation or substitution (e.g., 1, 2, 3, 4, 5 or more mutations) at any amino acid residue relative to a reference (e.g., SEQ ID NOs: 1-14, such as but not limited to SEQ ID NOs: 2-10). Amino acid substitutions in certain non-limiting embodiments include conservative amino acid substitutions, although non-conservative substitutions can also be used. Examples of conservative amino acid substitutions include those in which the substitution is within one of the five following groups: 1) small aliphatic, nonpolar or slightly polar residues (Ala, Ser, Thr, Pro, Gly); 2) polar, negatively charged residues and their amides (Asp, Asn, Glu, Gln); polar, positively charged residues (His, Arg, Lys); large aliphatic, nonpolar residues (Met, Leu, Ile, Val, Cys); and large aromatic resides (Phe, Tyr, Trp). Examples of non-conservative amino acid substitutions are those where 1) a hydrophilic residue, e.g., seryl or threonyl, is substituted for (or by) a hydrophobic residue, e.g., leucyl, isoleucyl, phenylalanyl, valyl, or alanyl; 2) a cysteine or proline is substituted for (or by) any other residue; 3) a residue having an electropositive side chain, e.g., lysyl, arginyl, or histidyl, is substituted for (or by) an electronegative residue, e.g., glutamyl or aspartyl; or 4) a residue having a bulky side chain, e.g., phenylalanine, is substituted for (or by) a residue that does not have a side chain, e.g., glycine.

### B. Other Polynucleotides

[0174] Also provided are isolated nucleic acid molecules or polynucleotides that encode the disclosed mRNAs. In certain non-limiting embodiments, the nucleic acid molecule/polynucleotide is or includes DNA. The polynucleotide can include one or more promoters and/or a polyadenylation signal operably linked to a sequence encoding the mRNA. In certain non-limiting embodiments, the polynucleotide is, or is contained within, a plasmid. In certain non-limiting embodiments, the polynucleotide is, or is contained within, a vector, such as an expression vector.

[0175] Expression vectors include all those known in the art, such as cosmids, plasmids (e.g., naked or contained in liposomes), phagemids, artificial chromosomes (e.g., BACs, YACs), and viral vectors (e.g., vectors derived from lentiviruses, retroviruses, adenoviruses, and adeno-associated viruses) that incorporate the polynucleotide.

[0176] In certain non-limiting embodiments, a polynucleotide (e.g., the portion thereof encoding a mRNA) is operably linked to a control element, e.g., a transcriptional control element, such as a promoter. The transcriptional control element may be functional in either a eukaryotic cell, e.g., a mammalian cell, or a prokaryotic cell (e.g., bacterial or archaeal cell). In certain non-limiting embodiments, a polynucleotide (e.g., the portion thereof encoding a mRNA thereof) is operably linked to multiple control elements that allow expression of the polynucleotide sequence encoding a mRNA in either prokaryotic or eukaryotic cells. Depending on the host/vector system utilized, any of a number of suitable transcription and translation control elements, including constitutive and inducible promoters, transcription enhancer elements, transcription terminators, etc. may be used in the expression vector (e.g., U6 promoter, HI promoter, CMV promoter, T7 promoter, SV40 promoter, bGH poly(A) signal, SV40 poly(A) signal, etc.).

[0177] Numerous vectors and expression systems are commercially available from commercial vendors including Addgene, Novagen (Madison, WI), Clontech (Palo Alto, CA), Stratagene (La Jolla, CA), and Invitrogen/Life Technologies (Carlsbad, CA). Suitable expression vectors include, but are not limited to, viral vectors such as viral vectors based on vaccinia virus, poliovirus, adenovirus, adeno-associated virus, SV40, herpes simplex virus, human immunodeficiency virus, retroviral vectors (e.g., Murine Leukemia Virus, spleen necrosis virus, and vectors derived from retroviruses such as Rous Sarcoma Virus, Harvey Sarcoma Virus, avian leukosis virus, lentivirus, human immunodeficiency virus, myeloproliferative sarcoma virus, and mammary tumor virus), and the like. The viral vector can be derived from a DNA virus (e.g., dsDNA or ssDNA virus) or an RNA virus (e.g., a ssRNA virus).

[0178] Numerous suitable expression vectors are known to those of skill in the art, and many are commercially available, including, pXTI, pSG5 (Stratagene), pSVK3, pBPV, pMSG, pCDNA 3.1, and pSVLSV40 (Pharmacia). However, any other vector may be used so long as it is compatible with the host cell.

[0179] Any cell may be used in accordance with the foregoing. In certain non-limiting embodiments, the cell is a prokaryotic cell (e.g., an archaeal or bacterial cell). In certain non-limiting embodiments, the cell is E. coli. In other forms, the cell is a eukaryotic cell. For example, the cell can be a cell of a single-cell eukaryotic organism, a plant cell, an algal cell, a fungal cell (e.g., a yeast cell). The cell can be a mammalian cell. The mammalian cell can be human or non-human mammal, e.g., primate, bovine, ovine, porcine, canine, rodent, monkey, rat, or mouse cell.

[0180] Generation of the polynucleotides can be accomplished using any suitable genetic engineering techniques well known in the art, including, without limitation, the standard techniques of restriction endonuclease digestion, ligation, transformation, plasmid purification, and DNA sequencing, for example as described in Sambrook et al. (Molecular Cloning: A Laboratory Manual. Cold Spring Harbor Laboratory Press, N.Y. (1989)).

C. Delivery vehicles

[0181] Also provided are vehicles for delivering or introducing the disclosed nucleic acids and compositions thereof to a cell. For example, vehicles for the introduction or production (e.g., transcription) of the disclosed mRNAs in a cell or tissue are described. Such vehicles include polynucleotides, such as plasmids and other vectors described above, which contain sequences encoding the mRNA. In certain non-limiting embodiments, viral vectors, virus-like particles, and/or lipid nanoparticles contain or encapsulate the disclosed mRNAs or polynucleotides encoding the disclosed mRNAs.

i. AAV

[0182] In certain non-limiting embodiments, the vector encoding a vaccine antigen (e.g., mRNA) is a viral vector. In certain non-limiting embodiments, the viral vector is an adeno-associated virus (AAV) vector.

[0183] AAV is a non-pathogenic, single-stranded DNA virus that has been actively employed over the years for delivering therapeutic genes in both in vitro and in vivo systems (Choi, et al., Curr. Gene Ther., 5:299-310, (2005)). AAV belongs to the parvovirus family and is dependent on co-infection with other viruses, mainly adenoviruses, in order to replicate. Each end of the single-stranded DNA genome contains an inverted terminal repeat (ITR), which is the only cis-acting element required for genome replication and packaging. The single-stranded AAV genome contains three genes, Rep (Replication), Cap (Capsid), and aap (Assembly). These three genes give rise to at least nine gene products through the use of three promoters, alternative translation start sites, and differential splicing. These coding sequences are flanked by the ITRs. The Rep gene encodes four proteins (Rep78, Rep68, Rep52, and Rep40), while Cap expression gives rise to the viral capsid proteins (VP; VP1/VP2/VP3), which form the outer capsid shell that protects the viral genome, as well as being actively involved in cell binding and internalization. It is estimated that the viral coat is comprised of 60 proteins arranged into an icosahedral structure with the capsid proteins in a molar ratio of 1:1:10 (VP1: VP2: VP3).

[0184] Recombinant AAV vectors having no Rep and/or Cap genes can be non-integrating. In the absence of Rep proteins, ITR-flanked transgenes encoded within rAAV can form circular concatemers that persist as episomes in the nucleus of transduced cells. Because recombinant episomal DNA does not integrate into host genomes, it will eventually be diluted over time as the cell undergoes repeated rounds of replication. This will eventually result in the loss of the transgene and transgene expression.

[0185] The sequences placed between the ITRs will typically include a promoter, gene of interest (e.g., encoding a disclosed mRNA), and a terminator. The promoter can be naturally-occurring or non-naturally occurring. In many cases, strong, constitutively active promoters are desired for high-level expression of the gene of interest. Examples of promoters, include, but are not limited to, viral promoters, plant promoters and mammalian promoters. Commonly used promoters include the CMV (cytomegalovirus) promoter/enhancer, EF1a (elongation factor 1a), SV40 (simian virus 40), chicken β-actin and CAG (CMV, chicken β-actin, rabbit β-globin) and variants thereof. All of these promoters provide constitutively active, high-level gene expression in most cell types. Some of these promoters are subject to silencing in certain cell types, therefore this consideration can be evaluated for each application.

[0186] Examples of terminators include, but are not limited to, polyadenylation signal sequences. Examples of polyadenylation signal sequences include, but are not limited to, Bovine growth hormone (BGH) poly(A), SV40 late poly(A), rabbit beta-globin (RBG) poly(A), thymidine kinase (TK) poly(A) sequences, and any variants thereof.

[0187] The viral vectors (e.g., AAV vector) can also have one or more restriction site(s) located near the promoter sequence to provide for the insertion of nucleic acid sequences encoding a mRNA/protein of interest.

[0188] The AAV vector used in the disclosed compositions and methods can be a naturally occurring serotype of AAV including, but not limited to, AAV1, AAV2, AAV3, AAV4, AAV5, AAV6, AAV7, AAV8, AAV9, AAV10, AAV11, AAV12, artificial variants such as AAV.rhlO, AAV.rh32/33, AAV.rh43, AAV.rh64R1, rAAV2-retro, AAV-DJ, AAV-PHP.B, AAV-PHP.S, AAV-PHP.eB, or other engineered versions of AAV. In a particular form, the AAV vector is AAV9. These serotypes differ in their tropism, or the types of cells they infect, making AAV a very useful system for in certain embodiments transducing specific cell types. Typically, AAV vectors have a packaging limit of ˜4.7 kb. The AAV itself may be immunogenic, which in some settings, can be used for its adjuvant effects.

ii. Virus-Like Particles

[0189] In certain non-limiting embodiments, a virus-like particle (VLP) includes a disclosed encoded spike protein or subunit or other fragment thereof. VLPs are small particles that contain certain proteins from the outer coat of a virus and can be constructed to present these proteins as antigens on their coat. Typically, VLPs lack the viral components that are required for virus replication and thus represent a highly attenuated, replication-incompetent form of a virus. Thus, VLPs can be regarded as non-replicating, viral shells, derived from any of several viruses. The VLP can display a polypeptide (e.g., a spike protein encoded by a disclosed mRNA) that is analogous to that expressed on infectious virus particles and can elicit an immune response to the corresponding virus when administered to a subject.

[0190] VLPs can be derived from various viruses such as e.g. the hepatitis B virus or other virus families including Parvoviridae (e.g. adeno-associated virus), Retroviridae (e.g. HIV), and Flaviviridae (e.g. Hepatitis C virus). For a general review see Sorensen M R and Thomsen A R, APMIS 115 (11): 1177-93 (2007) and Guillén et al., Procedia in Vaccinology 2 (2), 128-133 (2010).

[0191] VLPs are generally composed of one or more viral proteins, such as, but not limited to, those proteins referred to as capsid, coat, shell, surface and/or envelope proteins, or particle-forming polypeptides derived from these proteins. VLPs can form spontaneously upon recombinant expression of the protein in an appropriate expression system.

[0192] Virus like particles and methods of their production are known and familiar to the person of ordinary skill in the art, and viral proteins from several viruses are known to form VLPs, including human papillomavirus, HIV (Kang et al., Biol. Chem. 380:353-64 (1999)), Semliki-Forest virus (Notka et al., Biol. Chem. 380:341-52 (1999)), human polyomavirus (Goldmann et al., J. Virol. 73:4465-9 (1999)), rotavirus (Jiang et al., Vaccine 17:1005-13 (1999)), parvovirus (Casal, Biotechnology and Applied Biochemistry, Vol 29, Part 2, pp 141-150 (1999)), canine parvovirus (Hurtado et al., J. Virol. 70:5422-9 (1996)), hepatitis E virus (Li et al., J. Virol. 71:7207-13 (1997)), and Newcastle disease virus.

[0193] The presence of VLPs following recombinant expression of viral proteins can be detected using conventional techniques known in the art. For example, the formation of VLPs can be detected by any suitable technique including techniques known in the art for detection of VLPs in a medium include, e.g., electron microscopy techniques, dynamic light scattering (DLS), selective chromatographic separation (e.g., ion exchange, hydrophobic interaction, and/or size exclusion chromatographic separation of the VLPs) and density gradient centrifugation. VLPs can be isolated density gradient centrifugation and identified by characteristic density banding. See, for example, Baker et al. (1991) Biophys. J. 60:1445-1456; and Hagensee et al. (1994) J. Virol. 68:4503-4505; Vincente, J Invertebr Pathol., 2011; Schneider-Ohrum and Ross, Curr. Top. Microbiol. Immunol., 354:53073, 2012).

iii. Lipid Nanoparticles (LNPs)

[0194] In certain non-limiting embodiments, a disclosed mRNA or other disclosed polynucleotide (e.g., plasmid or vector) is formulated or encapsulated in a lipid nanoparticle. Non-limiting examples of lipid nanoparticles and methods of making them are described, for example, in Semple et al. (2010) Nat. Biotechnol. 28:172-176; Jayarama et al. (2012), Angew. Chem. Int. Ed., 51:8529-8533; and Maier et al. (2013) Molecular Therapy 21, 1570-1578, the contents of each of which are incorporated herein by reference in their entirety. Suitable lipid nanoparticle formulations are known in the art, see e.g., U.S. Pat. Nos. 9,950,065; 10,576,146; 10,485,884; 10,933,127; 10,703,789, and 10,702,600; which are hereby incorporated by reference in their entirety.

[0195] A lipid nanoparticle formulation may be influenced by, but not limited to, the selection of the cationic lipid component, the degree of cationic lipid saturation, the nature of the PEGylation, ratio of all components and biophysical parameters such as size. In one example by Semple et al. (Nature Biotech. 2010 28:172-176), the lipid nanoparticle formulation is composed of 57.1% cationic lipid, 7.1% dipalmitoylphosphatidylcholine, 34.3% cholesterol, and 1.4% PEG-c-DMA. As another example, changing the composition of the cationic lipid can more effectively deliver siRNA to various antigen presenting cells (Basha et al. Mol Ther. 2011 19:2186-2200).

[0196] In certain non-limiting embodiments, the lipid nanoparticle includes one or more cationic lipids (e.g., ionizable cationic lipid), one or more helper lipids, one or more sterols, one or more PEG-modified lipids, or a combination thereof. In certain embodiments, the lipid nanoparticle includes at least one cationic lipid (e.g., ionizable cationic lipid), at least one helper lipid, at least one sterol, and at least one PEG-modified lipid. In certain non-limiting embodiments, the cationic lipid is an ionizable cationic lipid, the helper lipid is a neutral lipid, and the sterol is cholesterol.

[0197] The ionizable cationic lipids, which are pH-sensitive, attract anionic nucleic acids to form the core of self-assembling nanoparticle to ensure high encapsulation. Ionizable lipids are protonated at low pH, which makes them positively charged, but they remain neutral at physiological pH. The pH-sensitivity of ionizable lipids is beneficial for mRNA delivery in vivo, because neutral lipids have less interactions with the anionic membranes of blood cells and, thus, improve the biocompatibility of lipid nanoparticles. This also eliminates a mechanism of toxicity seen with permanently cationic molecules. Trapped in endosomes, in which the pH is lower than in the extracellular environment, ionizable lipids are protonated and, therefore, become positively charged, which may promote membrane destabilization and facilitate endosomal escape of the nanoparticle and/or encapsulated mRNA or other nucleic acid.

[0198] In certain non-limiting embodiments, a lipid nanoparticle includes about 35 to 45% cationic lipid, about 40% to 50% cationic lipid, about 50% to 60% cationic lipid, or about 55% to 65% cationic lipid. In certain non-limiting embodiments, the cationic lipid is selected from 2,2-dilinoleyl-4-dimethylaminoethyl [1,3]-dioxolane (DLin-KC2-DMA), dilinoleyl-methyl-4-dimethylaminobutyrate (DLin-MC3-DMA), and di ((Z)-non-2-en-1-yl) 9-((4-(dimethylamino) butanoyl)oxy) heptadecanedioate (L319). Suitable ionizable cationic lipids also include, without limitation, PNI ionizable lipid, SM-102, ALC-0315, DLin-DMA, DLin-D-DMA, DLin-MC3-DMA, DLin-KC2-DMA, DODMA, 1,2-dimyristoyl-sn-glycero-3-ethylphosphocholine (DMEPC), 1,2-di-O-octadecenyl-3-trimethylammonium propane (DOTMA), 1,2-dioleoyl-3-trimethylammonium propane (DOTAP), amino alcohol lipids and combinations thereof. Combinations of any of the foregoing cationic lipids can be used in various ratios.

[0199] Exemplary helper lipids include, but are not limited to, 1,2-distearoyl-sn-glycero-3-phosphocholine (DSPC), 1,2-di-(9Z-octadecenoyl)-sn-glycero-3-phosphoethanolamine (DOPE), 1-palmitoyl-2-oleoyl-sn-glycero-3-phosphocholin (POPC) and 1,2-dioleoyl-sn-glycero-3-phosphocholine (DOPC). In certain non-limiting embodiments, the LNP includes from about 0.5% to about 15% on a molar basis of the helper lipid e.g., from about 3 to about 12%, from about 5 to about 10% or about 15%, about 10%, or about 7.5% on a molar basis. Examples of helper lipids include, but are not limited to, DSPC, POPC, DPPC, DOPE and SM.

[0200] The LNPs can include a sterol component. For example, a sterol component may be included to confer suitable physicochemical and biological behavior. Such a sterol component may be selected from cholesterol or its derivative e.g., ergosterol or cholesterolhemisuccinate, but it is In certain non-limiting embodiments cholesterol. Cholesterol is often used in lipidic formulations because it is generally recognized that the presence of cholesterol decreases their permeability and protects them from the destabilizing effect of plasma or serum proteins. In certain embodiments, the sterol is cholesterol. In certain non-limiting embodiments, the sterol is a cholesterol-PEG conjugate. Combinations of any of the foregoing sterols can be used in various ratios. In certain non-limiting embodiments, the LNP includes from about 5% to about 50% on a molar basis of the sterol (e.g., about 15 to about 45%, about 20 to about 40%, about 40%, about 38.5%, about 35%, or about 31% on a molar basis).

[0201] Exemplary PEG-modified lipids include, but are not limited to, R-3-[(ω-methoxy-poly(ethyleneglycol)2000)carbamoyl)]-1,2-dimyristyloxypropyl-3-amine (PEG-c-DOMG or PEG-DOMG), 1,2-dimyristoyl-racglycero-3-methoxypolyethylene glycol-2000 (PEG-DMG), PEG2000-DMG, 1,2-Distearoyl-sn-glycerol, methoxypolyethylene glycol (PEG-DSG), 1,2-Dipalmitoyl-sn-glycerol, methoxypolyethylene glycol (PEG-DPG), PEG-CDMA, mPEG-OH, mPEG-AA (mPEG-CM), mPEG-CH₂CH₂CH₂—NH₂, MPEG-DMG, mPEG-N,N-Ditetradecylacetamide (ALC-0159), mPEG-DSPE, and mPEG-DPPE, and combinations thereof (further discussed in Reyes et al., J. Controlled Release, 107, 276-287 (2005), which is hereby incorporated by reference in its entirety). Combinations of any of the foregoing PEG-modified lipids can be used in various ratios.

[0202] In certain non-limiting embodiments, the LNPs include about 0.5% to 20% on a molar basis of the PEG or PEG-modified lipid (e.g., about 0.5 to 10%, about 0.5 to 5%, about 0.5%, about 1.5%, about 3.5%, or about 5% on a molar basis). In certain non-limiting embodiments, a PEG-modified lipid includes a PEG molecule of an average molecular weight of 2,000 Da. In certain non-limiting embodiments, a PEG-modified lipid includes a PEG molecule of an average molecular weight of less than 2,000 Da, for example around 1,500 Da, around 1,000 Da, or around 500 Da. The ratio of PEG in the lipid nanoparticle formulations may be increased or decreased and/or the carbon chain length of the PEG lipid may be modified from (e.g., from C14 to C18) to alter the pharmacokinetics and/or biodistribution of the lipid nanoparticle formulations. As a non-limiting example, lipid nanoparticle formulations may contain 0.5% to 3.0%, 1.0% to 3.5%, 1.5% to 4.0%, 2.0% to 4.5%, 2.5% to 5.0%, or 3.0% to 6.0% of the lipid molar ratio of PEG-modified lipid as compared to the cationic lipid, helper lipid and sterol.

[0203] In certain non-limiting embodiments, the LNP formulation may contain PEG-DMG 2000 (1,2-dimyristoyl-sn-glycero-3-phophoethanolamine-N-[methoxy (polyethylene glycol)-2000). In certain non-limiting embodiments, the LNP formulation may contain PEG-DMG 2000, a cationic lipid known in the art and at least one other component. In certain non-limiting embodiments, the LNP formulation may contain PEG-DMG 2000, a cationic lipid known in the art, DSPC and cholesterol. As a non-limiting example, the LNP formulation may contain PEG-DMG 2000, DLin-DMA, DSPC and cholesterol. As another non-limiting example, the LNP formulation may contain PEG-DMG 2000, DLin-DMA, DSPC and cholesterol in a molar ratio of 2:40:10:48 (see, e.g., Geall et al., PNAS, 109 (36): 14604-9 (2012); PMID: 22908294).

[0204] In certain non-limiting embodiments, the lipid nanoparticle contains a lipid mixture in ratios of about 20-70% cationic lipid, 5-45% helper lipid, 20-55% cholesterol, 0.5-15% PEG-modified lipid; such as but not limited to about 20-60% ionizable cationic lipid, about 5-25% helper lipid, about 25-55% sterol, and/or about 0.5-15% PEG-modified lipid. In some certain embodiments, the lipid nanoparticle has a molar ratio of about 20-60% cationic lipid, about 5-25% helper lipid, 25-55% sterol, and 0.5-15% PEG-modified lipid. In certain non-limiting embodiments, the lipid nanoparticle includes about 25-75% of a cationic lipid, 0.5-15% of a helper lipid, 5-50% of a sterol, and 0.5-20% of PEG-modified lipid on a molar basis. In certain non-limiting embodiments, the lipid nanoparticle includes about 35-65% of a cationic lipid, 3-12% of a helper lipid, 15-45% of a sterol, and 0.5-10% of a PEG-modified lipid on a molar basis.

[0205] In certain non-limiting embodiments, the lipid nanoparticle has a mean diameter of about 10-500 nm, about 20-400 nm, about 30-300 nm, or about 40-200 nm. In certain non-limiting embodiments, the lipid nanoparticle has a mean diameter of about 20-100 nm, 40-100 nm, 50-100 nm, 50-150 nm, about 50-200 nm, about 80-100 nm or about 80-200 nm.

[0206] In certain non-limiting embodiments, the ratio of lipid to RNA (e.g., mRNA) in a lipid nanoparticle may be 5:1 to 20:1, 10:1 to 25:1, 15:1 to 30:1 and/or at least 30:1. In some certain embodiments, the ratio of lipid to mRNA in the disclosed lipid nanoparticles is in the range of about 5:1 to 20:1, inclusive. In some certain embodiments, the ratio of lipid to mRNA is 6:1. In certain non-limiting embodiments, the lipid to mRNA ratio is a molar ratio. For example, in some certain embodiments, the N:P molar ratio of a lipid nanoparticle containing mRNA is 6:1. The N:P ratio refers to the ratio of positively-chargeable polymer amine (N=nitrogen) groups to negatively-charged nucleic acid phosphate (P) groups. N:P ratio is an important physicochemical property of polymer-based gene delivery vehicles. The N:P character of a polymer/nucleic acid complex can influence many other properties such as its net surface charge, size, and stability.

[0207] Lipid nanoparticle formulations may be altered by replacing the cationic lipid with a biodegradable cationic lipid which is known as a rapidly eliminated lipid nanoparticle (reLNP). Ionizable cationic lipids, such as, but not limited to, DLinDMA, DLin-KC2-DMA, and DLin-MC3-DMA, have been shown to accumulate in plasma and tissues over time and may be a potential source of toxicity. The rapid metabolism of the rapidly eliminated lipids can improve the tolerability and therapeutic index of the lipid nanoparticles by an order of magnitude from a 1 mg/kg dose to a 10 mg/kg dose in rat. Inclusion of an enzymatically degraded ester linkage can improve the degradation and metabolism profile of the cationic component, while still maintaining the activity of the reLNP formulation. The ester linkage can be internally located within the lipid chain or it may be terminally located at the terminal end of the lipid chain. The internal ester linkage may replace any carbon in the lipid chain.

[0208] The lipids in the LNPs can improve nanoparticle properties, such as particle stability, delivery efficacy, tolerability and biodistribution. For example, 1,2-distearoyl-sn-glycero-3-phosphocholine (DSPC), a phosphatidylcholine with saturated tails, has a melting temperature of ˜54° C. and a cylindrical geometry that allows DSPC molecules to form a lamellar phase, which stabilizes the structure of lipid nanoparticles. DSPC has been used in the mRNA-1273 and BNT162b2 COVID-19 vaccines. DOPE is a phosphoethanolamine with two unsaturated tails, which has a melting temperature of ˜30° C. and a conical shape120. DOPE tends to adopt an inverted hexagonal H (II) phase, which destabilizes endosomal membranes and facilitates endosomal escape of lipid nanoparticles.

[0209] Cholesterol can enhance particle stability by modulating membrane integrity and rigidity. The molecular geometry of cholesterol derivatives can further affect delivery efficacy and biodistribution of lipid nanoparticles. For example, cholesterol analogues with C-24 alkyl phytosterols increase the in vivo delivery efficacy of LNP-mRNA formulations. Here, the length of the hydrophobic tails of the cholesterol analogues, the flexibility of sterol rings and the polarity of hydroxy groups impact delivery efficacy.

[0210] PEG-modified lipids can have multiple effects on the properties of lipid nanoparticles. The amount of PEG-modified lipids can affect particle size and zeta potential. PEG-lipids can further contribute to particle stability by decreasing particle aggregation, and certain PEG modifications prolong the blood circulation time of nanoparticles by reducing clearance mediated by the kidneys and the mononuclear phagocyte system

[0211] Once they reach target cells, lipid nanoparticles can be internalized by multiple mechanisms, including macropinocytosis and clathrin-mediated and caveolae-mediated endocytosis. The endocytic pathway depends on the properties of the nanoparticle and the cell type. Following cellular internalization, lipid nanoparticles are usually trapped in endosomal compartments. Thus, endosomal escape is crucial for effective mRNA or other nucleic acid delivery. It is believed that positively charged lipids may facilitate electrostatic interaction and fusion with negatively charged endosomal membranes, resulting in the leak of mRNA or other nucleic acid molecules into the cytoplasm. Endosomal escape can be increased by optimizing the pKa values of ionizable lipids. Furthermore, the properties of lipidic tails can affect endosomal escape of lipid nanoparticles. For example, some lipids with branched tails show enhanced endosomal escape compared with their counterparts with linear tails, owing to stronger protonation at endosomal pH. In addition, modulating the type (for example, DSPC and DOPE) and ratio of lipids may improve endosomal escape. See Hou X., et al., Nat Rev Mater., 1-17. (2021) doi: 10.1038/s41578-021-00358-0 for a discussion of the design of lipid nanoparticles for mRNA delivery and the physiological barriers and suitable administration routes for lipid nanoparticle-mRNA systems.

### D. Pharmaceutical Formulations

[0212] Also provided are pharmaceutical formulations including one or more of the more disclosed compositions (e.g., mRNA, other polynucleotide such as plasmids and vectors, optionally provided in a disclosed delivery vehicle (e.g., AAV, VLP, LNP) and one or more pharmaceutically acceptable carriers, diluents, and/or excipients.

[0213] In certain non-limiting embodiments, a pharmaceutical composition or formulation includes a disclosed lipid nanoparticle with one or more disclosed mRNAs encapsulated in the LNP, and a pharmaceutically acceptable carrier, diluent, or excipient. In certain non-limiting embodiments, a pharmaceutical composition or formulation includes a disclosed lipid nanoparticle encapsulating one or more disclosed polynucleotides (e.g., plasmids or vectors) encapsulated in the LNP, and a pharmaceutically acceptable carrier, diluent, or excipient. In certain non-limiting embodiments, a pharmaceutical composition or formulation includes a AAV vector containing a sequence encoding a disclosed mRNA and a pharmaceutically acceptable carrier, diluent, or excipient. In certain non-limiting embodiments, a pharmaceutical composition or formulation includes a VLP containing one or more encoded polypeptides (e.g., spike proteins or subunits or other fragment thereof) and a pharmaceutically acceptable carrier, diluent, or excipient.

[0214] Pharmaceutical compositions may optionally further include one or more additional active agents, e.g., therapeutic and/or prophylactic agents. General considerations in the formulation and/or manufacture of pharmaceutical agents may be found, for example, in Remington: The Science and Practice of Pharmacy 21st ed., Lippincott Williams & Wilkins, 2005.

[0215] The pharmaceutical compositions are In certain non-limiting embodiments sterile and contain an effective amount of the active compounds (e.g., mRNAs optionally encapsulated in LNPs, and optionally further agents) to generate the desired reaction or the desired effect. Pharmaceutical compositions are usually provided in a uniform dosage form and may be prepared in an appropriate manner. The pharmaceutical composition may for example be in the form of a solution or suspension. The pharmaceutical composition may include salts, buffer substances, preservatives, carriers, diluents and/or excipients all of which are In certain non-limiting embodiments pharmaceutically acceptable. Pharmaceutically acceptable refers to the non-toxicity of a material which does not interact with the action of the active component of the pharmaceutical composition.

[0216] The term “excipient” when used herein is intended to indicate all substances which may be present in a pharmaceutical composition and which are not active ingredients such as, e.g., carriers, binders, lubricants, thickeners, surface active agents, preservatives, emulsifiers, buffers, flavoring agents, or colorants. Pharmaceutically acceptable excipients include any and all solvents, dispersion media, diluents, or other liquid vehicles, dispersion or suspension aids, surface active agents, isotonic agents, thickening or emulsifying agents, preservatives, solid binders, lubricants and the like, as suited to the particular dosage form desired. Remington's The Science and Practice of Pharmacy, 21st Edition, A. R. Gennaro (Lippincott, Williams & Wilkins, Baltimore, Md., 2006; incorporated herein by reference in its entirety) discloses various excipients used in formulating pharmaceutical compositions and known techniques for the preparation thereof.

[0217] In certain non-limiting embodiments, an excipient is approved for use in humans and for veterinary use. In certain non-limiting embodiments, an excipient is approved by United States Food and Drug Administration. In certain non-limiting embodiments, an excipient is pharmaceutical grade. In certain non-limiting embodiments, an excipient meets the standards of the United States Pharmacopoeia (USP), the European Pharmacopoeia (EP), the British Pharmacopoeia, and/or the International Pharmacopoeia.

[0218] Exemplary diluents include, but are not limited to, calcium carbonate, sodium carbonate, calcium phosphate, dicalcium phosphate, calcium sulfate, calcium hydrogen phosphate, sodium phosphate lactose, sucrose, cellulose, microcrystalline cellulose, kaolin, mannitol, sorbitol, inositol, sodium chloride, dry starch, cornstarch, powdered sugar, etc., and combinations thereof.

[0219] Exemplary granulating and/or dispersing agents include, but are not limited to, potato starch, corn starch, tapioca starch, sodium starch glycolate, clays, alginic acid, guar gum, citrus pulp, agar, bentonite, cellulose and wood products, natural sponge, cation-exchange resins, calcium carbonate, silicates, sodium carbonate, cross-linked poly (vinyl-pyrrolidone) (crospovidone), sodium carboxymethyl starch (sodium starch glycolate) and combinations thereof.

[0220] Exemplary binding agents include, but are not limited to, starch (e.g. cornstarch and starch paste); gelatin; sugars (e.g. sucrose, glucose, dextrose, dextrin, molasses, lactose, lactitol, mannitol); natural and synthetic gums (e.g. acacia, sodium alginate, extract of Irish moss, panwar gum, ghatti gum, mucilage of isapol husks, carboxymethylcellulose, methylcellulose, ethylcellulose, hydroxyethylcellulose, hydroxypropyl cellulose, hydroxypropyl methylcellulose, and combinations thereof.

[0221] Exemplary preservatives may include, but are not limited to, antioxidants, chelating agents, antimicrobial preservatives, antifungal preservatives, alcohol preservatives, acidic preservatives, and/or other preservatives. Exemplary antioxidants include, but are not limited to, alpha tocopherol, ascorbic acid, acorbyl palmitate, butylated hydroxyanisole, butylated hydroxytoluene, monothioglycerol, potassium metabisulfite, propionic acid, propyl gallate, sodium ascorbate, sodium bisulfite, sodium metabisulfite, and/or sodium sulfite. Exemplary chelating agents include ethylenediaminetetraacetic acid (EDTA), citric acid monohydrate, disodium edetate, dipotassium edetate, edetic acid, fumaric acid, malic acid, phosphoric acid, sodium edetate, tartaric acid, and/or trisodium edetate. Exemplary antimicrobial preservatives include, but are not limited to, benzalkonium chloride, benzethonium chloride, benzyl alcohol, bronopol, cetrimide, cetylpyridinium chloride, chlorhexidine, chlorobutanol, chlorocresol, chloroxylenol, cresol, ethyl alcohol, glycerin, hexetidine, imidurea, phenol, phenoxyethanol, phenylethyl alcohol, phenylmercuric nitrate, propylene glycol, and/or thimerosal. Exemplary antifungal preservatives include, but are not limited to, butyl paraben, methyl paraben, ethyl paraben, propyl paraben, benzoic acid, hydroxybenzoic acid, potassium benzoate, potassium sorbate, sodium benzoate, sodium propionate, and/or sorbic acid.

[0222] Exemplary buffering agents include, but are not limited to, citrate buffer solutions, acetate buffer solutions, phosphate buffer solutions, ammonium chloride, calcium carbonate, calcium chloride, calcium citrate, calcium glubionate, calcium gluceptate, calcium gluconate, D-gluconic acid, calcium glycerophosphate, calcium lactate, propanoic acid, calcium levulinate, pentanoic acid, dibasic calcium phosphate, phosphoric acid, tribasic calcium phosphate, calcium hydroxide phosphate, potassium acetate, potassium chloride, potassium gluconate, potassium mixtures, dibasic potassium phosphate, monobasic potassium phosphate, potassium phosphate mixtures, sodium acetate, sodium bicarbonate, sodium chloride, sodium citrate, sodium lactate, dibasic sodium phosphate, monobasic sodium phosphate, sodium phosphate mixtures, tromethamine, magnesium hydroxide, aluminum hydroxide, alginic acid, pyrogen-free water, isotonic saline, Ringer's solution, ethyl alcohol, etc., and/or combinations thereof. In certain non-limiting embodiments, suitable buffer substances include acetic acid in a salt, citric acid in a salt, boric acid in a salt, and phosphoric acid in a salt.

[0223] Exemplary lubricating agents include, but are not limited to, magnesium stearate, calcium stearate, stearic acid, silica, talc, malt, glyceryl behenate, hydrogenated vegetable oils, polyethylene glycol, sodium benzoate, sodium acetate, sodium chloride, leucine, magnesium lauryl sulfate, sodium lauryl sulfate, etc., and combinations thereof.

[0224] The pharmaceutical compositions may be administered via any conventional route, such as by parenteral administration including by injection or infusion. Administration is In certain non-limiting embodiments parenterally, e.g., intravenously, intraarterially, subcutaneously, intradermally or intramuscularly. The term “parenteral administration” refers to the administration in a manner other than through the digestive tract, as by intravenous or intramuscular injection. Systemic administration is a route of administration that is either enteral, i.e., administration that involves absorption through the gastrointestinal tract, or parenteral. In certain non-limiting embodiments, the pharmaceutical compositions can be administered by a route selected from, for example, intramuscular, intradermal, subcutaneous, intravenous, intra-arterial, intra-articular, intraperitoneal, intranasal, sublingual, tonsillar, oropharyngeal, or other parenteral and mucosal routes. Actual methods for preparing administrable compositions will be known or apparent to those skilled in the art.

[0225] Compositions suitable for parenteral administration usually include a sterile aqueous or nonaqueous preparation of the active compound(s), which is In certain non-limiting embodiments isotonic to the blood of the recipient. Examples of compatible carriers and solvents are water, Ringer's solution, U.S.P., and isotonic sodium chloride solution. In addition, usually sterile, fixed oils are used as solution or suspension medium. For this purpose, any bland fixed oil can be employed including synthetic mono- or diglycerides. Fatty acids such as oleic acid can be used in the preparation of injectables.

[0226] Injectable preparations, for example, sterile injectable aqueous or oleaginous suspensions may be formulated according to the known art using suitable dispersing agents, wetting agents, and/or suspending agents. Sterile injectable preparations may be sterile injectable solutions, suspensions, and/or emulsions in nontoxic parenterally acceptable diluents and/or solvents, for example, as a solution in 1,3-butanediol. Injectable formulations can be sterilized, for example, by filtration through a bacterial-retaining filter, and/or by incorporating sterilizing agents in the form of sterile solid compositions which can be dissolved or dispersed in sterile water or other sterile injectable medium prior to use.

[0227] Aqueous solutions of the pharmaceutical formulations may be packaged for use as is or lyophilized. Lyophilized preparations can be combined with a sterile solution prior to administration for either single or multiple dosing.

### Vaccines

[0228] The disclosed compositions, including pharmaceutical compositions can be suitable for use as vaccines. Thus, vaccines are provided herein. A vaccine is a biological preparation that improves or provides immunity to a particular disease or infectious agent. In certain non-limiting embodiments, a vaccine includes a disclosed pharmaceutical composition, optionally in combination with one or more adjuvants. In certain non-limiting embodiments, a vaccine includes a disclosed lipid nanoparticle encapsulating one or more mRNAs, optionally in combination with one or more adjuvants.

[0229] In certain embodiments, a vaccine includes a lipid nanoparticle encapsulating a mRNA which encodes a coronavirus spike protein or subunit or other fragment thereof (e.g., ECD, S1, S2, NTD and/or RBD) derived from SARS-CoV, MERS-CoV, SARS-CoV-2, or variants thereof. In some certain embodiments, the vaccine includes a lipid nanoparticle encapsulating a mRNA which encodes a coronavirus spike protein or subunit or other fragment thereof derived from a SARS-CoV-2 variant, such as B.1.1.7, B.1.351, B.1.351.2, B.1.351.3, B.1.617.1, B.1.617.2, B.1.617.3, P.1, P.1.1, P.1.2, B.1.427 B.1.429, B.1.525, B.1.526, P.2, B.1.621 and B.1.621.1.

[0230] In certain non-limiting embodiments, the vaccine can be multivalent, including mRNAs encoding proteins from multiple pathogens. For example, In certain non-limiting embodiments, a vaccine includes a lipid nanoparticle encapsulating multiple mRNAs which collectively encodes coronavirus spike proteins or subunits or other fragments thereof (e.g., ECD, S1, S2, NTD and/or RBD) derived from SARS-CoV, MERS-CoV, and/or SARS-CoV-2, including variants thereof. In some certain embodiments, the vaccine includes a lipid nanoparticle encapsulating three mRNAs collectively encoding spike proteins or subunits or other fragments thereof (e.g., ECD, S1, S2, NTD and/or RBD) derived from SARS-CoV, MERS-CoV, and SARS-CoV-2 including variants thereof. In such forms, the multivalent vaccine can induce immunity against SARS-CoV, MERS-CoV, and SARS-CoV-2 concurrently.

[0231] In certain non-limiting embodiments, a vaccine includes a lipid nanoparticle encapsulating multiple mRNAs which collectively encode coronavirus spike proteins or subunits or other fragments thereof (e.g., ECD, S1, S2, NTD and/or RBD) derived from SARS-CoV and MERS-CoV, including variants thereof. In certain non-limiting embodiments, a vaccine includes a lipid nanoparticle encapsulating multiple mRNAs which collectively encode coronavirus spike proteins or subunits or other fragments thereof (e.g., ECD, S1, S2, NTD and/or RBD) derived from SARS-CoV-2 and MERS-CoV, including variants thereof. In certain non-limiting embodiments, a vaccine includes a lipid nanoparticle encapsulating multiple mRNAs which collectively encode coronavirus spike proteins or subunits or other fragments thereof (e.g., ECD, S1, S2, NTD and/or RBD) derived from SARS-CoV and SARS-CoV-2, including variants thereof.

[0232] In certain non-limiting embodiments, the mRNAs encoding proteins from multiple pathogens are provided in equivalent amounts, e.g., 1:1 ratio, 1:1:1 ratio, etc.

[0233] The vaccines can also include one or more mRNAs encoding chimeric proteins derived by combining sequences from multiple pathogens (e.g., from different viral species or variants). The chimeric protein can be a chimeric coronavirus spike protein which has sequences from different coronavirus species or variants, such as SARS-CoV, MERS-CoV, SARS-CoV-2, and variants of each of the foregoing, such as SARS-CoV-2 B.1.1.7, SARS-CoV-2 B.1.351 (including B.1.351.2 and B.1.351.3), SARS-CoV-2 B.1.617 (including B.1.617.1, B.1.617.2, and SARS-CoV-2 B.1.617.3), P.1, P.1.1, P.1.2, B.1.427 B. 1.429, B.1.525, B.1.526, P.2, B.1.621 and B.1.621.1.

[0234] In some certain embodiments, a vaccine includes a lipid nanoparticle encapsulating mRNAs encoding a chimeric protein containing two or more spike proteins or subunits or other fragments thereof (in frame with each other) from distinct coronavirus species or variants. In some certain embodiments, a vaccine includes a lipid nanoparticle encapsulating mRNAs encoding a chimeric protein which contains a first spike protein or subunit or other fragment thereof (e.g., ECD, S1, S2, NTD, RBD) of a coronavirus selected from SARS-CoV, MERS-CoV, SARS-CoV-2 and variants thereof, and a second spike protein or subunit or other fragment thereof (e.g., ECD, S1, S2, NTD, RBD) of a coronavirus selected from SARS-CoV, MERS-CoV, SARS-CoV-2 and variants thereof, wherein the first spike protein or subunit or other fragment thereof is from a different viral species or variant from the second spike protein or subunit or other fragment thereof.

[0235] In some certain embodiments, a vaccine includes a lipid nanoparticle encapsulating mRNAs encoding i) a chimeric protein having an S1 subunit from SARS-CoV-2 B.1.351 and an S2 subunit from SARS-CoV-2 B.1.617 (e.g., B.1.617.2 or B.1.617.3), ii) a chimeric protein having an S1 subunit from SARS-CoV and an S2 subunit from SARS-CoV-2 (e.g., native/wildtype, B.1.1.7, B.1.351, B.1.617.2, B.1.617.3), iii) a chimeric protein having an S1 subunit from MERS-CoV and an S2 subunit from SARS-CoV-2 (e.g., native/wildtype, B.1.1.7, B.1.351, B.1.617.2, B.1.617.3), and a chimeric protein having an S1 subunit from MERS-CoV and an S2 subunit from SARS-CoV. In certain non-limiting embodiments, the mRNAs (encapsulated in the nanoparticle) contain sequences encoding SPY-Tag/SPY-Catcher sequences, such that upon translation of the mRNAs, the chimeric protein is formed by covalent ligation of two peptide components encoded by the mRNAs (see, e.g., FIGS. 9-10).

[0236] Besides the LNP and encapsulated nucleic acid, the vaccine can also contain one or more excipients selected from sodium chloride, monobasic potassium phosphate, potassium chloride, dibasic sodium phosphate dihydrate, tromethamine, tromethamine hydrochloride, acetic acid, sodium acetate, and sucrose. In some certain embodiments, the vaccine includes sodium chloride, monobasic potassium phosphate, potassium chloride, dibasic sodium phosphate dihydrate, and sucrose. In some certain embodiments, the vaccine includes tromethamine, tromethamine hydrochloride, acetic acid, sodium acetate, and sucrose.

[0237] The disclosed vaccines can further include, or may be administered in combination with, one or more adjuvants. Adjuvants describe compounds which prolong, enhance, accelerate, and/or exacerbate an immune response. Various mechanisms are possible in this respect, depending on the type of adjuvants used. In certain non-limiting embodiments, the vaccines include, or are administered in combination with, one or more adjuvants. In certain non-limiting embodiments, the vaccines do not include, or are not administered in combination with, one or more adjuvants.

[0238] Non-limiting examples of suitable adjuvants include cytokines, such as monokines, lymphokines, interleukins or chemokines (e.g., IL-1, IL-2, IL-3, IL-4, IL-5, IL-6, IL-7, IL-8, IL-9, IL-10, IL-12, INFα, INF-γ, GM-CSF, LT-α), lipopolysaccharides (LPS), CD40 ligands, GP96, dsRNA, CpG oligodeoxynucleotides, growth factors (e.g. hGH), aluminium hydroxide, Freund's adjuvant or oil such as Montanide®, In certain non-limiting embodiments Montanide® ISA51, lipid-A and derivatives or variants thereof, oil-emulsions, saponins, and Pam3Cys. These adjuvants have the advantage in that they help to stimulate the immune system in a non-specific way, thus enhancing the immune response to a pharmaceutical product.

### III. Methods of Making

[0239] Methods of making the disclosed mRNAs, other polynucleotides, and compositions and pharmaceutical formulations thereof are provided.

[0240] Polynucleotides may be prepared according to any available technique including, but not limited to chemical synthesis, enzymatic synthesis, which is generally termed in vitro transcription (IVT) or enzymatic or chemical cleavage of a longer precursor, etc. Methods of synthesizing RNAs are known in the art (see, e.g., Gait, M. J. (ed.) Oligonucleotide synthesis: a practical approach, Oxford [Oxfordshire], Washington, D.C.: IRL Press, 1984; and Herdewijn, P. (ed.) Oligonucleotide synthesis: methods and applications, Methods in Molecular Biology, v. 288 (Clifton, N.J.) Totowa, N.J.: Humana Press, 2005; both of which are incorporated herein by reference).

[0241] The process of design and synthesis of the primary constructs of the disclosure generally includes the steps of gene construction, mRNA production (either with or without modifications) and purification. In the enzymatic synthesis method, a target polynucleotide sequence encoding the polypeptide of interest is first selected for incorporation into a vector which will be amplified to produce a cDNA template. Optionally, the target polynucleotide sequence and/or any flanking sequences may be codon optimized. The cDNA template is then used to produce mRNA through in vitro transcription (IVT).

[0242] mRNAs may be made using standard laboratory methods and materials. In certain non-limiting embodiments, mRNAs are produced by in vitro transcription of a linear or circularized DNA template (e.g., plasmid or other expression vector) containing sequences encoding the mRNAs. Plasmids or other expression vectors can be linearized by methods known in the art, such as restriction enzymes. The linearization reaction may be purified using methods including, for example Invitrogen's PURELINK™ PCR Micro Kit (Carlsbad, Calif.), and HPLC based purification methods such as, but not limited to, strong anion exchange HPLC, weak anion exchange HPLC, reverse phase HPLC (RP-HPLC), and hydrophobic interaction HPLC (HIC-HPLC) and Invitrogen's standard PURELINK™ PCR Kit (Carlsbad, Calif.).

[0243] The DNA template may be transcribed using an in vitro transcription (IVT) system. The system typically includes a transcription buffer, nucleotide triphosphates (NTPs), an RNase inhibitor and a polymerase. The NTPs may be manufactured in house, may be selected from a supplier, or may be synthesized as described herein. The NTPs may be selected from, but are not limited to, those described herein including natural and unnatural (modified) NTPs. The polymerase may be selected from, but is not limited to, T7 RNA polymerase, T3 RNA polymerase and mutant polymerases such as, but not limited to, polymerases able to incorporate modified nucleic acids.

[0244] The DNA template may be removed using methods known in the art such as, but not limited to, treatment with Deoxyribonuclease I (DNase I). RNA clean-up may also include a purification method such as, but not limited to, AGENCOURT® CLEANSEQ® system from Beckman Coulter (Danvers, Mass.), and HPLC based purification methods such as, but not limited to, strong anion exchange HPLC, weak anion exchange HPLC, reverse phase HPLC (RP-HPLC), and hydrophobic interaction HPLC (HIC-HPLC).

[0245] The mRNA construct may undergo capping and/or tailing reactions. A capping reaction may be performed by methods known in the art to add a 5′ cap to the 5′ end of the primary construct. Methods for capping include, but are not limited to, using a Vaccinia Capping enzyme (New England Biolabs, Ipswich, Mass.), optionally with a 2′-O methyl-transferase. If a poly(A) tail is not encoded in the DNA template and thus absent from the mRNA transcript, a poly(A) tailing reaction may be performed by methods known in the art, such as, but not limited to, poly(A) Polymerase mediated tailing.

[0246] Subsequently, mRNA clean-up may be performed by methods known in the arts such as, but not limited to, AGENCOURT® beads (Beckman Coulter Genomics, Danvers, Mass.), poly-T beads, LNA™ oligo-T capture probes (EXIQON® Inc, Vedbaek, Denmark) or HPLC based purification methods such as, but not limited to, strong anion exchange HPLC, weak anion exchange HPLC, reverse phase HPLC (RP-HPLC), and hydrophobic interaction HPLC (HIC-HPLC). The term “purified” when used in relation to a polynucleotide such as a “purified mRNA” refers to one that is separated from at least one contaminant. Thus, a purified polynucleotide (e.g., DNA or RNA) is present in a form or setting different from that in which it is found in nature, or a form or setting different from that which existed prior to subjecting it to a treatment or purification method.

[0247] The disclosed mRNAs can be formulated by mixing the mRNA with LNPs at a set ratio. Methods for synthesis of LNPs are known in the art. See for example, WO 2010/054401; Heyes et. al, J. Control Release, 107, 276-287 (2005); Semple et. al, Nature Biotechnology, 28, 172-176 (2010); Love et. al, PNAS, 107, 1864-1869 (2010) and Akinc et. al, Nature Biotechnology, 26, 561-569 (2008), all of which are hereby incorporated by reference in their entirety.

[0248] In certain non-limiting embodiments, solutions of the lipids/sterols forming the LNPs are combined in the appropriate molar ratio and diluted with ethanol to a final desired lipid concentration. Solutions of mRNA at a desired concentration in water can be diluted in sodium citrate buffer. Formulations of the lipid and mRNA can be prepared by combining the synthesized lipid solution with the mRNA solution at a desired total lipid to mRNA ratio. The formulations can be dialyzed one or more times against phosphate buffered saline (PBS) to remove the ethanol and to achieve buffer exchange. The resulting nanoparticle suspension can be filtered and stored as appropriate or used in accordance with the disclosed methods.

### IV. Methods of Antigen Design

[0249] Methods for the design of antigens suitable for use in the disclosed compositions (e.g., vaccines) are also provided. In certain non-limiting embodiments, antigens can be designed using one or more approaches described in working Example 4. For example, antigens can be designed using artificial intelligence and/or machine learning approaches (see Example 4). The designed antigens can be based on any pathogen, such as a virus, for example, a coronavirus including, but not limited to, SARS-CoV, MERS-CoV, and SARS-CoV-2.

[0250] In certain non-limiting embodiments, a method of vaccine design includes compiling a catalogue of genomic sequences from a plurality of organisms (e.g., viruses) and alignment of the sequences. The method may further involve Principal components analysis and/or training and evaluating machine learning base models (e.g., supervised learning). In certain non-limiting embodiments, accuracy scores obtained from machine learning models can be used to determine pathogenicity (COPA) scores (e.g., using a statistical hypothesis test-based meta-model).

[0251] The method can further include kernel regression smoothing to identify pathogenicity hotspots across the various genome sequences, optionally using COPA scores combined with local maxima identification.

[0252] In certain non-limiting embodiments the method can include B-cell and/or T-cell epitope analysis. For example, sequences for reference antigenic proteins can be used to predict B cell epitopes. In certain non-limiting embodiments, linear B-cell epitopes probability scores can be obtained as described in Jespersen et al., 2017. For T-cell epitope, prediction of peptides binding to MHC class I and/or class II molecules can be performed using TepiTool (see, Paul et al., 2016) from the Immune Epitope Database (IEDB) Analysis Resource.

### V. Methods of Use

[0253] Methods of using the disclosed mRNAs, other polynucleotides, compositions and pharmaceutical formulations thereof, and vaccines are also provided.

A. Protein expression

[0254] In certain non-limiting embodiments, the mRNAs and other polynucleotides can be used in methods to express and/or purify a desired protein or peptide, such as a coronavirus spike protein or subunit or other fragment thereof. For example, In certain non-limiting embodiments, a method of producing a recombinant coronavirus spike protein c (e.g., ECD, NTD, RBD, S1, and/or S2) involves introducing an appropriate disclosed mRNA or other disclosed polynucleotide (e.g., plasmid, expression vector) to a host cell under conditions sufficient for expression thereof, thereby producing the recombinant spike protein. In certain non-limiting embodiments, the recombinant spike protein is stabilized in a prefusion conformation due to the presence of one or more mutations. In certain non-limiting embodiments, the recombinant spike protein is a chimeric/hybrid spike protein or subunit or other fragment thereof. In certain non-limiting embodiments, the foregoing methods can further include purifying the spike protein or subunit or other fragment thereof from the cell.

### B. Vaccination

[0255] The disclosed pharmaceutical compositions and vaccines can be used in methods of inducing an immune response or vaccination. Typically, the immune response is against a coronavirus, including antigens thereof, such as a spike protein or subunit or other fragment thereof. In certain non-limiting embodiments, a method of inducing an immune response in a subject involves administering to the subject a disclosed vaccine in an effective amount to generate the immune response.

[0256] In certain non-limiting embodiments, the immune response is specific to a coronavirus such as MERS-CoV, SARS-CoV, or SARS-CoV-2, including variants thereof. In certain non-limiting embodiments, the immune response is specific to native/wildtype SARS-CoV-2 or a SARS-CoV-2 variant such as B.1.1.7, B.1.351, B.1.351.2, B.1.351.3, B.1.617.1, B.1.617.2, and/or B.1.617.3. In certain non-limiting embodiments, the immune response is specific to multiple coronaviruses. For example, administration of a single (e.g., multivalent) vaccine can induce an immune response specific to two or more coronaviruses selected from MERS-CoV, SARS-CoV, or SARS-CoV-2. In certain non-limiting embodiments, the immune response is specific the three coronaviruses: MERS-CoV, SARS-CoV, or SARS-CoV-2, including variants of each of the foregoing.

[0257] In certain non-limiting embodiments, the immune response is a T cell response. In certain non-limiting embodiments, the immune response is a B cell response. In certain non-limiting embodiments, the immune response involves both a T cell and B cell response. In certain non-limiting embodiments, the immune response involves a neutralizing antibody response specific to the coronavirus spike protein or subunit or other fragment thereof. In certain non-limiting embodiments, the immune response inhibits coronavirus infection in the subject. In certain non-limiting embodiments, the immune response inhibits replication of the coronavirus in the subject. The immune response can be a protective immune response, for example a response that inhibits subsequent infection with the virus (e.g., SARS-CoV-2). Elicitation of the immune response can also be used to treat or inhibit viral infection and illnesses associated with the virus, such as COVID-19.

[0258] Administration of a disclosed vaccine can be for prophylactic or therapeutic purpose. When provided prophylactically, the vaccine is provided in advance of any symptom, for example, in advance of infection. The prophylactic administration serves to prevent or ameliorate the course of any subsequent infection. When provided therapeutically, the vaccine is provided at or after the onset of a symptom of infection, for example, after development of a symptom of SARS-CoV-2 infection or after diagnosis with a SARS-CoV-2 infection. The vaccine can thus be provided prior to the anticipated exposure to the virus (e.g., SARS-CoV-2) so as to attenuate the anticipated severity, duration or extent of an infection and/or associated disease symptoms, after exposure or suspected exposure to the virus, or after the actual initiation of an infection.

[0259] In certain non-limiting embodiments, the subject being vaccinated has been exposed to, is infected with, or is at risk of infection by the coronavirus. In certain non-limiting embodiments, the subject is immunocompromised. In certain non-limiting embodiments, the subject is human.

i. Effective Amounts and Dosage Regimens

[0260] The pharmaceutical compositions, vaccines and other compositions described herein are administered in effective amounts. For example, the vaccine is provided to a subject in an amount effective to induce or enhance an immune response. The effective amount achieves a desired response or effect alone or together with further doses. In the case of treatment of a particular disease or of a particular condition, the desired response can be inhibition of the course of the disease. This can include slowing down the progress of the disease and, in particular, interrupting or reversing the progress of the disease. The desired response in a treatment of a disease or of a condition may also be delay of the onset or a prevention of the onset of said disease or said condition.

[0261] An effective amount of an agent or composition (e.g., vaccine) can depend on the disease indication, the severeness of the disease, the individual parameters of the subject (e.g., age, physiological condition, size and weight, fitness, extent of symptoms, susceptibility factors, and the like), the duration of treatment, the type of an accompanying therapy (if present), the specific route of administration, as well as the specific pharmacology of the composition for eliciting the desired activity or biological response in the subject, and similar factors. Accordingly, the doses administered of the vaccines may depend on various of such parameters. In certain non-limiting embodiments, the vaccine is administered in an effective amount to elicit a desired immune response, for example, a T cell and/or B cell response, and/or a neutralizing antibody response.

[0262] In certain non-limiting embodiments, a vaccine can be provided in unit dosage form for use to induce an immune response in a subject. A unit dosage form contains a suitable single preselected dosage for administration to a subject, or suitable marked or measured multiples of two or more preselected unit dosages, and/or a metering mechanism for administering the unit dose or multiples thereof.

[0263] Vaccination can involve one or more doses or administrations of the vaccines. In certain non-limiting embodiments, a single dose of a vaccine is administered. In certain non-limiting embodiments, two or more doses of a vaccine are administered. The two or more doses can be administered on different days, for example, about 14-28 (e.g., 14, 21, or 28) days apart. In certain non-limiting embodiments, the two or more doses can be administered 1, 2, 3, 4, 5, 6 or more months apart.

[0264] In certain non-limiting embodiments, each administration of the vaccine provides a dose of about 1 μg, 3 μg, 10 μg, 25 μg, 30 μg, or 100 μg. In certain non-limiting embodiments, the effective amount of the vaccine is a total dose (e.g., over multiples administrations) of about 1-500 μg, inclusive.

[0265] Dosage regimens can be adjusted to provide an optimum prophylactic or therapeutic response. A vaccine can be used in coordinate (or prime-boost) vaccination protocols or combinatorial formulations. In certain non-limiting embodiments, coordinate immunization protocols employ separate vaccines, each directed toward eliciting an anti-viral immune response, such as an immune response to SARS-CoV-2 and variants thereof. Separate vaccines that elicit an antiviral immune response can be combined in a polyvalent vaccine composition administered to a subject in a single immunization step, or they can be administered separately (in monovalent vaccine compositions) in a coordinate (or prime-boost) immunization protocol. There can be several boosts, and each boost can be a vaccine presenting a different immunogen (e.g., spike protein or subunit or other fragment thereof) from the same or different virus.

[0266] The prime and boost can be administered as a single dose or multiple doses, for example two doses, three doses, four doses, five doses, six doses or more can be administered to a subject over days, weeks or months. Multiple boosts can also be given, such one to five (e.g., 1, 2, 3, 4 or 5 boosts), or more. Different dosages can be used in a series of sequential immunizations. In certain non-limiting embodiments, the boost can be administered about two, about three to eight, or about four weeks following the prime, or about several months after the prime. In certain non-limiting embodiments, the boost can be administered about 5, about 6, about 7, about 8, about 10, about 12, about 18, about 24, months after the prime, or more or less time after the prime. Periodic additional boosts can also be used at appropriate time points to enhance the subject's immune memory. The adequacy of the vaccination parameters chosen, e.g., formulation, dose, regimen and the like, can be determined by taking aliquots of serum from the subject and assaying antibody titers during the course of the immunization program. In addition, the clinical condition of the subject can be monitored for the desired effect, e.g., prevention of infection or improvement in disease state (e.g., reduction in viral load). If such monitoring indicates that vaccination is sub-optimal, the subject can be boosted with an additional vaccine d and/or the vaccination parameters can be modified in a fashion expected to potentiate the immune response.

ii. Routes of Administration

[0267] The vaccines and other pharmaceutical compositions may be administered by any suitable route. Administration can be local or systemic. Exemplary routes of administration include, but are not limited to, enteral, gastroenterol, epidural, oral, transdermal, epidural (peridural), intracerebral (into the cerebrum), intracerebroventricular (into the cerebral ventricles), epicutaneous (application onto the skin), intradermal, (into the skin itself), subcutaneous (under the skin), nasal administration (through the nose), intravenous (into a vein), intraarterial (into an artery), intramuscular (into a muscle), intracardiac (into the heart), intraosseous infusion (into the bone marrow), intrathecal (into the spinal canal), intraperitoneal, (infusion or injection into the peritoneum), intravesical infusion, intravitreal (through the eye), intracavernous injection (into the base of the penis), intravaginal, intrauterine, transdermal (diffusion through the intact skin for systemic distribution), transmucosal (diffusion through a mucous membrane), insufflation (snorting), and sublingual.

[0268] In certain non-limiting embodiments, administration is via intradermal or intramuscular injection, or via oral, intranasal or intratracheal administration. For example, administration can be via drops or sprays. In certain embodiments, administration is via intramuscular injection.

### VI. Kits

[0269] The disclosed polynucleotides, reagents, compositions, and other materials can be packaged together in any suitable combination as a kit useful for performing, or aiding in the performance of, the methods. It is useful if the components in a given kit are designed and adapted for use together in the method.

[0270] For example, kits including vaccines or other compositions for administration to a subject, may include a pre-measured dosage of the composition in a sterile needle, ampule, tube, container, or other suitable vessel. The kits may include instructions for dosages and dosing regimens. In certain non-limiting embodiments, the vaccine compositions are lyophilized. The kit may further include agents (e.g., saline, a buffered solution) and instructions to form a formulation for administration. The instructions may specify suitable storage conditions for the kit and components thereof.

[0271] Also provided are kits for protein production. Such kits can include a disclosed polynucleotide (e.g., plasmid or other expression vector), viruses, virus-like particles, and/or instructions for use. The kit can further include reagents and instructions for transfection or transduction of recipient cells.

### EXAMPLES

### Example 1: Generation and Characterization of the Immune Responses Induced by Wildtype SARS-CoV-2 Spike mRNA-LNP Vaccine

### Materials and Methods

### Plasmid Construction

[0272] The DNA sequences of B.1.351 and B.1.617 SARS-CoV-2 spikes for the mRNA transcription and pseudovirus assay were synthesized as gBlocks (IDT) and cloned by Gibson Assembly (NEB) into pcDNA3.1 plasmids. To improve expression and retain prefusion conformation, six prolines (HexaPro variant, 6P) were introduced to the SARS-CoV-2 spike sequence in the mRNA transcription plasmids. The plasmids for the pseudotyped virus assay including pHIV_{NL}GagPol and pCCNanoLuc2AEGFP were gifts from Dr. Bieniasz′ lab⁵¹. The C-terminal 19 amino acids were deleted in the SARS-CoV-2 spike sequence for the pseudovirus assay.

### Cell Culture

[0273] HEK293T (ThermoFisher) and 293T-hACE2 (gifted from Dr Bieniasz′ lab) cell lines were cultured in complete growth medium, Dulbecco's modified Eagle's medium (DMEM; Thermo fisher) supplemented with 10% Fetal bovine serum (FBS, Hyclone), 1% penicillin-streptomycin (Gibco) (D10 media for short). Cells were typically passaged every 1-2 days at a split ratio of 1:2 or 1:4 when the confluency reached at 80%.

mRNA Production by In Vitro Transcription and Vaccine Formulation

[0274] A linearized DNA template containing the B.1.351 variant (6P) or B.1.617 variant (6P) open reading frame flanked by 5′ untranslated region (UTR) and 3′ UTR sequences and terminated by an encoded polyA tail was used as template for transcription. The above DNA templates were obtained from circular plasmids pVP22b (B.1351 variant (6P)) and pVP29b (B.1.617 variant (6P)). pVP22b and pVP29b plasmids were linearized with BbsI restriction enzyme digestion and cleaned up with gel purification. A sequence-optimized mRNA encoding B.1.351 variant (6P) or B.1.617 variant (6P) protein was synthesized in vitro using an Hiscribe™ T7 ARCA mRNA Kit (with tailing) (NEB), with 50% replacement of uridine by N1-methyl-pseudouridine.

[0275] The mRNA was synthesized and purified following the manufacturer's instructions and kept frozen at −80° C. until further use. The mRNA was encapsulated in a lipid nanoparticle (Genvoy-ILM™, Precision Nanosystems) using the NanoAssemblr® Ignite™ machine (Precision Nanosystems) following the guidance of manufacturers. In brief, Genvoy-ILM™, containing ionizable, structural, helper and polyethylene glycol lipids were mixed with mRNA in acetate buffer, pH 5.0, at a ratio of 6:1 (Genvoy-ILM™: mRNA). The mixture was neutralized with Tris-Cl pH 7.5, sucrose was added as a cryoprotectant. The final solution was sterile filtered and stored frozen at −80° C. until further use. The particle size of mRNA-LNP was determined by DLS machine (DynaPro NanoStar, Wyatt, WDPN-06). The encapsulation and mRNA concentration were measured using Quant-iT™ RiboGreen™ RNA Assay Kit (Thermofisher).

### Animals

[0276] M. musculus (mice), 6-8 weeks old females of C57BL/6Ncr, were purchased from Charles River and used for the immunogenicity studies. Animals were housed in individually ventilated cages in a dedicated vivarium with clean food, water, and bedding. Animals were housed with a maximum of 5 mice per cage, at regular ambient room temperature (65-75° F., or 18-23° C.), 40-60% humidity, and a 14 h: 10 h light cycle. All experiments utilized randomized littermate controls.

### Mice Immunization and Sample Collection

[0277] A standard two-dose schedule given 21 days apart was adopted¹. 1 μg or 10 μg LNP-mRNA were diluted in 1×PBS and inoculated into mice intramuscularly for prime and boost injections. Control mice received PBS. Two weeks post-prime (day 14) and two weeks post-boost (day 35), sera were collected from experimental mice and utilized for ELISA and pseudovirus neutralization assays. Forty days (day 40) after prime, mice were euthanized for endpoint data collection. Splenocytes were collected for T cell stimulation and cytokine analysis, and single cell profiling. Lymphocytes were separately collected from mouse blood, spleen and draining lymph nodes and used for Bulk BCR and TCR profiling.

### Flow Cytometry

[0278] Spleens from three mice in LNP mRNA vaccine groups and four mice in PBS group were collected five days post boost. Mononuclear single-cell suspensions from whole mouse spleens were generated using the above method. 0.5 million splenocytes were resuspended with 200 μl into RPMI 1640 supplemented with 10% FBS, 1% penicillin-streptomycin antibiotic, Glutamax and 2 mM 2-mercaptoethonal, anti-mouse CD28 antibody (Biolegend, Clone 37.51) and seeded into 96-well plate overnight. The splenocytes were incubated for 6 hr at 37° C. in vitro with BrefeldinA (Biolegend) under three conditions: no peptide, PMA/Ionomycin, and PepTivator® SARS-CoV-2 Prot_S Complete peptide pool (Miltenyi Biotec, 15 mers with 11 amino acid overlap) covering the entire SARS-CoV-2 S protein.

[0279] Peptide pools were used at a final concentration of 200 ng/ml. Following stimulation, cells were washed with PBS before surface staining with LIVE/DEAD Fixable Dead Cell Stain (Invitrogen, 1:1000) and a surface stain cocktail containing the following antibodies: CD3 PE/Cy7 (Biolegend, Clone 17A2, 1:200), CD8a BV421 (Biolegend, Clone QA17A07, 1:200), CD4 FITC (Biolegend, Clone GK1.5, 1:200) in MACS buffer (D-PBS with 2 mM EDTA and 0.5% BSA) on ice for 20 min, cells were washed with MACS buffer then fixed and permeabilized using the BD Cytofix/Cytoperm fixation/permeabilization solution kit according to the manufacturer's instructions. Cells were washed in perm/wash solution for 5 min, and stained by intracellular staining for 30 min at 4° C. using a cocktail of the following antibodies: IFN-γ PE (Biolegend, Clone W18272D,1:500), TNF Percp-Cy5.5 (Biolegend, Clone MP6-XT22, 1:500), IL2 BV510 (Biolegend, Clone JES6-5H4, 1:500), IL4 BV605 (Biolegend, Clone 11B11,1:500), IL5 APC (Biolegend, Clone TRFK5,1:500) in MACS buffer. Finally, cells were washed in MACS for twice and resuspended in MACS buffer before running on BD FACSAria II Cell Sorter (BD). Analysis was performed using FlowJo software.

### ELISA

[0280] 384-well ELISA plates were coated with 3 μg/ml of antigens overnight at 4 degrees. The antigen panel used in the ELISA assay includes SARS-CoV-2 spike S1+S2 ECD and RBD of 2019-nCoV (SINO, ECD 40589-V08B1 and RBD 40592-V08B), Indian variant B.1.617 (SINO, ECD 40589-V08B12 and RBD 40592-V08H88), South African variant (SINO, ECD 40589-V08B07 and RBD 40592-V08H85) and spike RBD of wild-type, South African variant and Indian variant. Plates were washed with PBS plus 0.5% Tween 20 (PBST) three times using the 50TS microplate washer (Fisher Scientific, NC0611021) and blocked with 0.5% BSA in PBST at room temperature for one hour. Plasma was serially diluted twofold or fourfold starting at a 1:2000 dilution. Samples were added to the coated plates and incubated at room temperature for one hour, followed by washes with PBST five times. Anti-mouse secondary antibody was diluted to 1:2500 in blocking buffer and incubated at room temperature for one hour. Plates were washed five times and developed with tetramethylbenzidine substrate (Biolegend, 421101). The reaction was stopped with 1 M phosphoric acid, and OD at 450 nm was determined by multimode microplate reader (PerkinElmer EnVision 2105). The binding response (OD450) was plotted against the dilution factor in log 10 scale to display the dilution-dependent response. The area under curve of the dilution-dependent response (Log 10 AUC) was calculated to evaluate the potency of the serum antibody binding to spike antigens.

### SARS-CoV-2 Pseudovirus Reporter and Neutralization Assays

[0281] HIV-1 based SARS-CoV-2 WT, B.1.351 variant, and B.1.617 variant pseudotyped virions were generated using respective spike sequences, and used in neutralization assays. Plasmid expressing a C-terminally truncated SARS-CoV-2 S protein (pSARS-CoV-2Δ19) was from Dr Bieniasz′ lab. Plasmids expressing a C-terminally truncated SARS-CoV-2 B.1.351 variant S protein (B.1.351 variant-Δ19) and SARS-CoV-2 B.1.617 variant S protein (B.1.617 variant-Δ19) were generated as above. The three plasmid-based HIV-1 pseudotyped virus systems were utilized to generate (HIV-1/NanoLuc2AEGFP)-SARS-CoV-2 particles, (HIV-1/NanoLuc2AEGFP)-B.1.351 variant particles, and B.1.617 variant particles. The reporter vector, pCCNanoLuc2AEGFP, and HIV-1 structural/regulatory proteins (pHIVNLGagPol) expression plasmid were gifts from Dr Bieniasz's lab. Briefly, 293T cells were seeded in 150 mm plates, and transfected with 21 μg pHIVNLGagPol, 21 μg pCCNanoLuc2AEGFP, and 7.5 μg of a SARS-CoV-2 SΔ19 or B.1.351 variant-Δ19 or SARS-CoV-2 SA SΔ19 plasmid, utilizing 198 μl PEI. At 48 h after transfection, 20-ml supernatant was harvested and filtered through a 0.45-μm filter, and concentrated before being aliquoted and frozen at −80° C.

[0282] The pseudovirus neutralization assays were performed on 293T-hACE2 cells. One day before, 293T-hACE2 cells were plated in a 96 well plate at 0.01×10⁶ cells per well. The following day, 55 μL aliquots of serially diluted serum plasma, collected from PBS or LNP-mRNA vaccine immunized mice and starting from 1:100 (5-fold serial dilution using complete growth medium), were mixed with the same volume of SARS-CoV-2 WT, B.1.351 variant, and B.1.617 variant pseudovirus. The mixture was incubated for 1 hr in a 37° C. incubator supplied with 5% CO₂. Then 100 μL of the mixtures were added into 96-well plates with 293T-hACE2 cells. Plates were incubated at 37° C. supplied with 5% CO₂. 48 hr later, 293T-hACE2 cells were collected and the GFP+ cells were analyzed with Attune N×T Acoustic Focusing Cytometer (Thermo Fisher). The 50% inhibitory concentration (IC50) was calculated with a four-parameter logistic regression using GraphPad Prism (GraphPad Software Inc.).

### Negative-Stain TEM

[0283] 5 μl of the sample was deposited on a glow-discharged formvar/carbon-coated copper grid (Electron Microscopy Sciences, catalog number FCF400-Cu-50), incubated for 1 min and blotted away. The grid was washed briefly with 2% (w/v) uranyl formate (Electron Microscopy Sciences, catalog number 22450) and stained for 1 min with the same uranyl formate buffer. Images were acquired using a JEOL JEM-1400 Plus microscope with an acceleration voltage of 80 kV and a bottom-mount 4k×3k charge-coupled device camera (Advanced Microscopy Technologies, AMT).

### Statistical Analysis

[0284] The statistical methods are described in figure legends. The statistical significance was labeled as follows: n.s., not significant; * p<0.05; ** p<0.01; *** p<0.001; **** p<0.0001. Prism (GraphPad Software) and RStudio were used for these analyses.

### Replication, Randomization, Blinding and Reagent Validations

[0285] Replicate experiments have been performed for all key data shown in this study. Biological or technical replicate samples were randomized where appropriate. In animal experiments, mice were randomized by littermates. Experiments were not blinded.

[0286] NGS data processing were blinded using metadata. Subsequent analyses were not blinded.

[0287] Commercial antibodies were validated by the vendors and revalidated in house as appropriate. Custom antibodies were validated by specific antibody-antigen interaction assays, such as ELISA. Isotype controls were used for antibody validations.

[0288] Cell lines were authenticated by original vendors and revalidated in lab as appropriate. All cell lines tested negative for mycoplasma.

### Results

Design, Generation and Physical Characterization of Variant-Specific SARS-CoV-2 Spike mRNA-LNPs.

[0289] Nucleotide-modified mRNAs separately encoding full-length SARS-CoV-2 WT, B.1.351 and B.1.617 spike proteins were designed and generated. The HexaPro mutations (Wrapp, D. et al. Cryo-EM structure of the 2019-nCoV spike in the prefusion conformation. Science 367, 1260-1263, doi: 10.1126/science.abb2507 (2020)) were introduced and the furin cleavage site (Laczko, D. et al. A Single Immunization with Nucleoside-Modified mRNA Vaccines Elicits Strong Cellular and Humoral Immune Responses against SARS-CoV-2 in Mice. Immunity 53, 724-732 e727, doi: 10.1016/j.immuni.2020.07.019 (2020)) was replaced with a GSAS sequence to stabilize the prefusion state and preserve integrity of spike S1 and S2 subunits (FIG. 1A). The expression and receptor binding ability of modified spike proteins were confirmed by in vitro cell transfection followed by flow cytometry, where the spike binding to the human ACE2-Fc fusion protein was detected by PE-anti-Fc antibody. The spike mRNA was encapsulated in lipid nanoparticles (LNP), whose size and homogeneity were evaluated by dynamic light scattering (DLS) and transmission electron microscopy (TEM). The WT, B.1.351 and B.1.617 mRNA LNPs had mean diameters of 80.7±6.9 nm, 66.4±5.3 nm, and 72.2±5.8 nm with a monodispersed size distribution as determined by DLS and polydispersity indices of 0.08, 0.13 and 0.08, respectively.

[0290] The immunogenicity of the LNP-mRNA was assessed in C57BL/6Ncr mice by two intramuscular injections (doses) of 1 μg or 10 μg LNP-encapsulated mRNA, separated by 3 weeks (prime and boost, respectively) (FIG. 1B). Serum samples were collected two weeks after the prime and boost injections, and then subjected to ELISA and neutralization assays to evaluate the antibody response. These mice were sacrificed 40 days post vaccination, and the spleen, lymph nodes and blood cells were collected for downstream assays, including single cell transcriptomics sequencing (scRNA-seq), bulk and single cell BCR sequencing (BCR-seq) and TCR sequencing (TCR-seq), as well as flow cytometry (FIG. 1B). All procedures were standardized across all groups.

### Immune Responses Induced by WT-LNP-mRNA Vaccination in Mice

[0291] WT-LNP-mRNA induced dose-dependent binding antibody responses against spike ECD and RBD of SARS-CoV-2 WT, B.1.351 and B.1.617 variants after prime and boost injections (FIGS. 1C-1D). Compared to the post-prime immune response, orders of magnitude increase in immune response were observed after the boost injection, indicating that the second dose significantly boosted B cell immunity to SARS-CoV-2 antigen (FIGS. 1C-1D). Using a pseudovirus neutralization assay that has been widely reported to be consistent with authentic virus results (Chen, R. E. et al. In vivo monoclonal antibody efficacy against SARS-CoV-2 variant strains. Nature 596, 103-108, doi: 10.1038/s41586-021-03720-y (2021)), the serum samples from mice receiving the WT-LNP-mRNA vaccination also showed potent neutralization activity against all three variants, again with a strong prime-boost effect (FIG. 1E). However, the neutralization ability of WT-LNP-mRNA vaccinated sera was found to be several fold lower against either B.1.351 or B.1.617 as compared to the cognate WT pseudovirus (FIG. 1E). These observations are consistent with reports showing dramatic reduction in neutralization of B.1.351 and B.1.617 variants by vaccinated individuals' sera, convalescent sera, and therapeutic antibodies.

[0292] To evaluate the T cell response to the spike peptides, the splenocytes were isolated from mouse spleens 40 days post vaccination and the antigen-specific CD4⁺ and CD8⁺ T cell response to S peptide pools were determined by intracellular cytokine staining. WT-LNP-mRNA, at both low and high doses, induced reactive CD8⁺ T cells producing interferon γ (IFN-γ, IFNg), tumor necrosis factor α (TNF-α, TNFa), and interleukin 2 (IL-2) (FIG. 1F-1H), at levels consistent with previously reported studies (Laczko, D. et al. A Single Immunization with Nucleoside-Modified mRNA Vaccines Elicits Strong Cellular and Humoral Immune Responses against SARS-CoV-2 in Mice. Immunity 53, 724-732 e727, doi: 10.1016/j.immuni.2020.07.019 (2020); Corbett, K. S. et al. SARS-CoV-2 mRNA vaccine design enabled by prototype pathogen preparedness. Nature 586, 567-571, doi: 10.1038/s41586-020-2622-0 (2020)). WT-LNP-mRNA at both doses also induced reactive CD4⁺ T cells that produce IFN-γ⁺ (FIG. 1I), but little TNF-α, IL-2, IL-4, or IL-5. No difference in cytokine production was observed between vaccinated groups and the PBS group when cells were treated with vehicle (no peptide) or PMA/ionomycin. These results indicate that the WT-LNP-mRNA vaccine can induce potent spike protein specific CD4 and CD8 T cell responses.

### Example 2: Variant Specific SARS-CoV-2 Spike mRNA-LNP Vaccines Induce Potent Immune Responses

### Materials and Methods

In Vitro mRNA Expression

[0293] HEK293T cells were electroporated with mRNA encoding B.1351 variant (6P) or B.1.617 variant (6P) proteins using Neon™ Transfection System 10 μL Kit following the standard protocol provided by manufacturer. After 12 h, the cells were collected and resuspended in MACS buffer (D-PBS with 2 mM EDTA and 0.5% BSA). To detect surface-protein expression, the cells were stained with 10 μg/mL ACE2-Fc chimera (Genescript, Z03484) in MACS buffer for 30 min on ice. Thereafter, cells were washed twice in MACS buffer and incubated with PE-anti-human FC antibody (Biolegend, M1310G05) in MACS buffer for 30 min on ice. Live/Dead aqua fixable stain (Invitrogen) was used to assess viability. Data acquisition was performed on BD FACSAria II Cell Sorter (BD). Analysis was performed using FlowJo software.

### Results

### Binding and Neutralizing Antibody Responses of B.1.617-LNP-mRNA and B.1.351-LNP-mRNA

[0294] Both B.1.617-LNP-mRNA and B.1.351-LNP-mRNA induced dose-dependent binding antibody responses against spike ECD and RBD of SARS-CoV-2 WT, B.1.351 and B.1.617 variants (FIGS. 2A-2B, 2D-2E). The strong boost effect in ELISA was also observed for these two variant-specific LNP-mRNAs (FIGS. 2A-2B, 2D-2E). The dose-dependent effect was observed in both B.1.617-LNP-mRNA and B.1.351-LNP-mRNA groups across three types of ELISA antigens of both RBD and ECD, although the dose effect was less prominent in the post-boost samples, where both doses showed high titers at potential saturation level (FIGS. 2A-2B, 2D-2E). Relatively speaking, higher antibody responses was often observed with ECD antigen, suggesting an immunogenic domain other than RBD contributed to the additional response to spike ECD (FIGS. 2A-2B, 2D-2E). Overall, the binding intensity as measured by serum titer between RBD and ECD strongly correlated with each other across all vaccination groups.

[0295] The pseudovirus-neutralizing antibody response was then examined. Both B.1.617-LNP-mRNA and B.1.351-LNP-mRNA elicited potent neutralizing antibodies, a response which mirrored the trend of post-prime and post-boost responses observed by ELISA (FIGS. 2C, 2F). The initial level of neutralization was at 10²-10³ the level of reciprocal IC50 after priming for most groups (FIG. 2C, 2F). Consistent with findings by ELISA, an approximately two orders of magnitude increase in neutralization titer by boost was observed across all groups (for both vaccine candidates and for all three pseudovirus types) in the low dose (1 μg) setting, and there was an approximately one order of magnitude increase in the high dose (10 μg) setting (FIG. 2C, 2F). The dose effect of serum neutralization activity for both B.1.617-LNP-mRNA and B.1.351-LNP-mRNA was observed at priming for most groups, but negligible post boost (both 1 μg and 10 μg dose groups reached reciprocal IC50 titer of 104 level after boost) (FIG. 2C, 2F). Both B.1.617-LNP-mRNA and B.1.351-LNP-mRNA effectively neutralized all three SARS-CoV-2 pseudoviruses post boost at titers of 104 level (FIG. 2C, 2F). Interestingly, B.1.351-LNP-mRNA vaccinated animals neutralized all three SARS-CoV-2 pseudoviruses at similar levels post boost at both doses (FIG. 2C); while B.1.617-LNP-mRNA vaccinated animals showed significantly higher titer against its cognate B.1.617 pseudovirus (by several folds) (FIG. 2F). Overall, across all vaccination groups, the neutralization activity strongly correlated with ECD binding (FIG. 2G), which also holds true for RBD binding.

### B.1.617-LNP-mRNA and B.1.351-LNP-mRNA Elicited Strong Systemic T Cell Response Against SARS-CoV-2 Spike

[0296] To evaluate the T cell response to the spike peptides, splenocytes were isolated from mouse spleens 40 days post vaccination and the antigen-specific CD4⁺ and CD8⁺ T cell responses to S peptide pools were determined by intracellular cytokine staining. Positive control PMA/ionomycin treatment and negative control no peptide groups were both validated. Both B.1.617-LNP-mRNA and B.1.351-LNP-mRNA, at low and high doses, induced potent reactive CD8⁺ T cell responses evidenced by cellular production of IFN-γ, TNF-α, and IL-2 (FIGS. 3A-3C). At both doses, both LNP-mRNAs also induced reactive CD4⁺ T cells that produce IFN-γ (FIG. 3D), minimal TNFα (FIG. 3E), but no IL-2, IL-4, or IL-5.

### Example 3: Single Cell, BCR and TCR Repertoire Profiling in Variant-Specific LNP-mRNA Vaccinated Mice Show Systemic Immune Activation and Responses after Vaccination

### Materials and Methods

Cell Isolation from Animals

[0297] For every mouse treated with either LNP-mRNA or PBS. Blood, spleens and draining lymph nodes were separately collected. Spleen and lymph node were homogenized gently and filtered with a 100 μm cell strainer (BD Falcon, Heidelberg, Germany). The cell suspension was centrifuged for 5 min with 400 g at 4° C. Erythrocytes were lysed briefly using ACK lysis buffer (Lonza) with 1 mL per spleen for 1˜2 mins before adding 10 mL PBS containing 2% FBS to restore iso-osmolarity. The single-cell suspensions were filtered through a 40 μm cell strainer (BD Falcon, Heidelberg, Germany).

### Bulk BCR and TCR Sequencing

[0298] Lymphocytes from blood, draining lymph node, and spleen of each mRNA-LNP vaccinated and control mice were collected as described above for mouse immunization and sample collection. mRNA of lymphocytes from three tissues were extracted using a commercial RNeasy® Plus Mini Kit (Qiagen). Bulk BCR and TCR were prepared using SMARTer Mouse BCR IgG H/K/L Profiling Kit and SMARTer Mouse TCR a/b profiling kit separately (Takara). Based on the extracted mRNA amount of each sample, the input RNA amounts for bulk BCR libraries were as follows: lymphocytes from blood (100 ng), lymphocytes from lymph node (1000 ng), and lymphocytes from spleen (1000 ng). The input RNA amounts for bulk TCR libraries were as follows: lymphocytes from blood (100 ng), lymphocytes from lymph node (500 ng), and lymphocytes from spleen (500 ng). All procedures followed the standard protocol of the manufacture. The pooled library was sequenced using MiSeq (Illumina) with 2*300 read length.

### Bulk VDJ Sequencing Data Analysis

[0299] Raw fastq files from bulk BCR and TCR sequencing were processed by MiXCR v2.1.5 to clonotypes. Paired-end reads were merged and aligned to reference genes for Homo sapiens species using the function: mixer align-s hs, Clones were assembled using the mixer assemble function, then exported for specific chains (TRB, TRA, IGH, IGL, IGK) using the mixer exportClones function. TCR-seq and BCR-seq data was subsequently analyzed using the immunarch v0.6.6 R package for clonality analyses and calculating diversity metrics such as the Chao1 estimator and Gini-Simpson index.

### Single Cell Profiling

[0300] Splenocytes were collected from mRNA-LNP vaccinated and control mice as described above for mouse immunization and sample collection, and normalized to 1000 cells/μL. Standard volumes of cell suspension were loaded to achieve targeted cell recovery to 10000 cells. The samples were subjected to 14 cycles of cDNA amplification. Following this, gene expression (GEX), TCR-enriched and BCR-enriched libraries were prepared according to the manufacturer's protocol (10× Genomics). All libraries were sequenced using a NovaSeq 6000 (Illumina) with 2*150 read length.

### Single Cell Transcriptomics Data Analysis for Immune Repertoire Profiling

[0301] Both standard established pipelines and custom scripts were used for processing and analyzing single cell GEX data. Illumina sequencing data was processed using the Cellranger v5.0.1 (10× Genomics) pipeline and aligned to the mm 10 reference. Cellranger outputs were then processed and analyzed using standard Seurat v. 4.0.2 workflow, including log normalization with scale factor 10,000, scaling and centering, principal components analyses, nearest-neighbor graph construction, clustering with the Louvain algorithm, uniform manifold approximation and projection (UMAP), differential gene expression, and generation of various visualizations. The following parameters were used: for the FindNeighbors function, dims=1:10; for FindClusters, resolution=0.6; for RunUMAP, dims=1:10; for FindAllMarkers, only.pos=TRUE, min.pct=0.25, logfc.threshold=0.25.

[0302] Assignment of immune cell type identity to clusters was performed manually based on expression of cell type specific markers. Custom scripts were used for cell proportion calculations and condition-specific analyses and statistics (e.g. Wilcoxon rank sum test). While cluster 5 cells were annotated as “CD8 T/NKT cell” as it was a mixed population, these cells were merged with the “CD8 T cell” annotation for proportion calculations after cells with greater than 1 expression for any of the following markers were removed: Klrb1, Klra6, Klra1, Zbtb16. Differential gene expression between conditions for various cell types were performed by the FindMarkers function with the parameters logfc.threshold=0.01 and min.pct=0.1. For T-cell specific analyses, cells associated with the following terms were taken as a subset and used for standard Seurat pipeline analyses as described above: “CD4 T cell”, “CD8 T/NKT cell”, “CD8 T cell”, “T cell-like.” For B-cell specific analyses, cells associated with the following terms were taken as a subset: “B cell”, “B cell-like”, “Progenitor B cell”, “Plasma cell.”

[0303] For functional annotation, differentially upregulated and downregulated genes with cutoff of adjusted p-value 0.05 were used for DAVID analysis. Genes associated with gene ontology terms “regulation of immune effector process” (GO:0002697), “immune response” (GO:0006955), “regulation of T cell activation” (GO:0050863), and “regulation of B cell activation” (GO:0050864) were used for generating annotation-associated heatmaps. Custom R scripts were used for generating various other figures.

### Single Cell VDJ Sequencing Data Analysis

[0304] Illumina sequencing data was processed using the Cellranger v5.0.1 (10× Genomics) pipeline and aligned to the mm10 VDJ reference. The filtered_contig_annotations output file was used as an input to immunarch v0.6.6 R package for calculating diversity metrics such as the Chao1 estimator and Gini-Simpson index. The clonotypes output file was used for analysis with custom scripts for clonality analyses and CDR3 distribution ring plots.

### Results

### Single Cell Immune Repertoire Mapping of B.1.617-LNP-mRNA and B.1.351-LNP-mRNA Vaccinated Animals

[0305] To gain insights on the global composition and transcriptional landscape of the immune cells, single cell transcriptomics (scRNA-seq) was performed on the spleen samples of B.1.351-LNP-mRNA and B.1.617-LNP-mRNA vaccinated animals. Using a total of 16 animals from 4 vaccination groups (B.1.351-LNP-mRNA and B.1.617-LNP-mRNA at both 1 μg and 10 μg dose groups each), plus a control group (PBS treated), the transcriptomes of a total of 90,152 single cells were sequenced and visualized on a Uniform Manifold Approximation and Projection (UMAP). Clustering was performed with Louvain algorithm, which identified 21 clusters from respective signatures of their differentially expressed genes. With the expression of a number of cell type specific markers, such as markers for pan-leukocytes (Ptprc/Cd45), B cells (Cd19, Cd22), plasma cells (Sdc1/Cd138), T cells (Cd3e, Cd4, Cd8a, Cd8b1, Trac/TCRa), natural killer (NK) cells (Ncr1, Klrb1c), dendritic cells/macrophages/monocytes (Cd11b/Itgam, Cd11c/Itgax, Adgre/F4/80, Mrc1, Gsr1), red blood cells (RBCs) (Hba-a1), and neutrophils (S100a8, Mmp9), cellular identities were assigned to the clusters, which included B cells (Cd19⁺), progenitor B cells (Csflr⁺;Cd19⁺), plasma cells (Igha⁺/Ighm⁺;Sdc1⁺;Cd19⁻), B cell-like cells (Cd19⁺;Ly6a⁺;), CD4 T cells (Cd3e⁺;Cd4⁺), CD8 T cells (Cd3e⁺;Cd8a⁺;Cd8b1⁺), NKT cells (Klra1⁺;Klra6⁺;Zbtb16⁺), DCs (Itgam⁺;Itgax⁺), macrophages (Itgam⁺;Csflr⁺;Adgre⁺;Mrcl⁺), monocytes (Itgam⁺;Csflr+;Gsr1⁺), neutrophils (S100a8⁺/S100a9⁺;Mmp9⁺), NK cells (Cd3e⁻;Ncr1⁺,Klrb1c⁺), and RBCs (Ptprc⁻;Hba-a1⁺). While Cluster 5 predominantly contained CD8 T cells, it also contained a small population of NKT cells that were not separated by the automatic clustering algorithm. The single cell transcriptomics provided a landscape of systemic immune cell populations and their respective gene expression (GEX) data in B.1.351-LNP-mRNA and B.1.617-LNP-mRNA vaccinated along with placebo control animals.

[0306] The systemic (spleen) immune cell compositions between placebo and vaccinated animals were then compared. Out of the 21 clusters, three showed significantly changed fractions in the total splenocytes upon vaccination as compared to placebo, including a significant increase in Cluster 5 (composed of CD8 T cells and NKT cells) for both B.1.351-LNP-mRNA and B.1.617-LNP-mRNA, a slight increase in Cluster 7 (DCs) for B.1.351-LNP-mRNA, and a slight decrease in Cluster 11 (NK cells) for both LNP-mRNAs (FIG. 4A). Analysis by summing all of the same cell types from different clusters validated this finding, revealing a significant increase in CD8 T cells (after excluding NKT cells) for both for B.1.351-LNP-mRNA and B.1.617-LNP-mRNA, a slight increase in DCs for B.1.351-LNP-mRNA, and a slight decrease in NK cells for both vaccination groups (FIG. 4B). It was observed that a fraction of Cluster 5's CD8 T cells also showed positive expression of Nkg7, Ifng, Gzma, and Cxcr3, representing a cluster of more activated T cells. The increase in CD8 T cells, especially the cluster of more activated T cells, is consistent with the strong CD8 T cell responses as detected by flow cytometry (FIGS. 3A-3C), indicative of systemic CD8 T cell responses upon vaccination with these variant-specific LNP-mRNAs.

### Gene Expression Signatures of B Cell and T Cell Populations of B. 1.617-LNP-mRNA and B.1.351-LNP-mRNA Vaccinated Animals

[0307] Because B and T cells are the cornerstones of adaptive immunity against SARS-CoV-2, the B cell sub-populations and T cell sub-populations were further investigated. Using the global clustering results with a number of B cell lineage markers, a total of 49,236 B cell-associated populations were identified from all samples and conditions of the 16 mice. Using unbiased clustering, these B cell sub-population cells were divided into 15 Clusters, although the largest 8 clusters were near each other in UMAP space and formed a “supercluster”.

[0308] Similarly, using the global clustering results with T cell lineage markers, a total of 28,099 T cell-associated populations were identified. Using unbiased clustering, these T sub-population cells were divided into 12 Clusters. Using more refined T cell markers, cells that represent sub-classes of T cells were detected, such as CD4 T cells (Cd3e⁺;Cd4⁺), CD8 T cells (Cd3e⁺;Cd8a⁺;Cd8b1⁺), regulatory T cells (Tregs) (Cd3e⁺;Cd4⁺;Foxp3⁺), Th1-like T helper cells (Th1s) (Cd3e⁺;Cd4⁺;Cxcr6⁺;Tbx21/Tbet⁺;Stat4*), Th2-like T helper cells (Th2s) (Cd3e⁺;Cd4⁺;Ccr4⁺;Il4ra⁺;Stat6⁺), Th17-like T helper cells (Th17s) (Tregs) (Cd3e⁺;Cd4⁺;Rorc⁺;Stat3⁺), and T follicular helper cells (Tfhs) (Cd3e⁺;Cd4⁺;Cd40lg⁺; Il4⁺;Il21⁺). As observed in various single cell datasets (Lindeboom, R. G. H., Regev, A. & Teichmann, S. A. Towards a Human Cell Atlas: Taking Notes from the Past. Trends Genet 37, 625-630, doi: 10.1016/j.tig.2021.03.007 (2021)), gating cellular populations by gene expression of these markers does not always produce clear cut populations defined by canonical immune markers using flow cytometry, possibly due to the differences between mRNA vs. surface protein expression, as well as the pleiotropic roles of various genes.

[0309] To examine the transcriptomic changes in the B and T cell sub-populations upon vaccination, differential expression (DE) analysis was performed in the matched sub-populations between PBS and B.1.351-LNP-mRNA, or B.1.617-LNP-mRNA, groups. Vaccination caused differential expression of genes in host B cells, CD4 T cells and CD8 T cells. The differentially expressed genes intersected with genes in B cell activation, immune effector, and immune response genes, such as Lyn, Cd22 and Btla. The differentially expressed genes in CD4 and CD8 T cells also intersected with genes in T cell activation, immune effector, and immune response genes, such as Cd40lg, Perforin/Prf1, Dhx36, Ddx17, Ddx21, Ccl5, Il18r1, Ptpn22 and Plcg1. Interestingly, the top upregulated expressed genes in B cells represent transcription and translation machineries, which is consistent between B.1.351-LNP-mRNA and B.1.617-LNP-mRNA vaccination groups (FIGS. 5A-5F). This strong signature was also observed in T cells (FIGS. 5A-5F), consistent with the phenomenon of active lymphocyte activation upon vaccination.

### TCR and BCR Diversity Mapping of B.1.617-LNP-mRNA and B.1.351-LNP-mRNA Vaccinated Animals

[0310] To reveal the B and T cell clonal diversity and influence by vaccination, VDJ repertoire mapping and clonal analyses of B cell and T cell populations of B.1.351-LNP-mRNA and B.1.617-LNP-mRNA vaccinated animals was performed. Both single cell BCR sequencing (scBCR-seq) and single cell TCR sequencing (scTCR-seq) were performed on the spleen samples of all groups (4 vaccination groups and a PBS group, n=16 mice total). A total of 47,463 single B cells and 25,228 single T cells were sequenced. Clonal composition showed the BCR repertoire in the single cell BCR-seq dataset, revealing a trend towards decreased clonal diversity (FIG. 6A). The clonal composition of single cell TCR showed a significant decrease in clonal diversity (FIG. 6B). This phenomenon is consistent with the clonal expansion of stimulated lymphocytes upon vaccination, which is more pronounced in the scTCR-seq data.

[0311] To further validate the observations, bulk BCR-seq and bulk TCR-seq were also performed for all these mice on additional tissue samples, including spleen, peripheral blood (PB) and lymph node (LN). The bulk BCR-seq and TCR-seq data revealed systematic clonality maps of the spleen, PB and LN samples of the variant-specific LNP-mRNA vaccinated along with placebo treated animals (FIGS. 6C-6F). The bulk TCR-seq results, from both TCR alpha and beta chains (TRA and TRB), validated the observation of decreased clonal diversity from single cell VDJ profiling (FIGS. 6C-6F), again consistent with the notion of clonal expansion of a small number of clones. The clonal diversity decrease/clonal expansion effect was strongest in the PB samples that capture circulating T cells (FIGS. 6C-6F). These data together unveiled BCR and TCR repertoire clonality, diversity and respective shifts in variant-specific LNP-mRNA vaccinated animals as compared to placebo-treated.

### Selected Discussion

[0312] Although efficacious COVID-19 mRNA vaccines have been deployed globally, the rapid spread of SARS-CoV-2 VoCs, with higher contagiousness as well as resistance to therapies and vaccines, demands evaluation of next-generation COVID-19 vaccines specifically targeting these evolving VoCs. Mounting evidence has indicated that the B.1.351 and B.1.617 lineage variants of SARS-CoV-2 possesses much stronger immune escape capability than the original wildtype virus. The lower neutralizing titers in fully vaccinated patients were found associated with breakthrough infections. It has been speculated that the waning immunity from early vaccination and emergence of more virulent SARS-CoV-2 variants may lead to reduction in vaccine protection and increase of breakthrough infections. It has been reported that mRNA vaccines' efficacy against B.1.351 and B.1.617.2 dropped significantly. Moreover, for individuals receiving only a single dose of vaccine, the protective efficacy can be dramatically lower. It is worth noting that efficacy value and definition may vary from study to study, which have been conducted in different regions and populations. In view of these facts, this study evaluated next-generation mRNA vaccine candidates encoding the B.1.351 and B.1.617 spike as antigens.

[0313] This study characterized the titers and cross-reactivity of sera from mice vaccinated with WT-, B.1.351- or B.1.617-LNP-mRNAs to all three WT, B.1.351 and B. 1.617 spike antigens and pseudoviruses. In agreement with findings in patients' sera, it was observed that the neutralizing titers of WT vaccine sera were several fold lower against the two variants of concern than against WT pseudovirus. The B.1.617-LNP-mRNA vaccinated sera also showed particularly strong neutralization activity against its cognate B.1.617 pseudovirus, while the B.1.351-LNP-mRNA showed similar neutralization activity against all three pseudoviruses. It is worth noting that all three forms of vaccine candidates can induce potent B and T cell responses to WT as well as the two VoCs' spikes.

[0314] The T cell-biased immune response is important for antiviral immunity, and therefore, the efficacy and safety of viral vaccines. To evaluate the Th1 and Th2 immune response by the variant vaccines, intracellular staining of Th1 and Th2 cytokines was performed in splenocytes. After stimulation with peptide pools covering the entire S protein, the splenocytes from three mRNA vaccine groups produced more hallmark Th1 cytokine IFN-γ in both CD4⁺ and CD8⁺ T cells than those from PBS group. The flow cytometry data indicated that the two variant vaccine candidates induced strong Th1-biased immune responses, just like the WT vaccine, of which a Th1 response had been observed by previous studies in animal models (Corbett, K. S. et al. SARS-CoV-2 mRNA vaccine design enabled by prototype pathogen preparedness. Nature 586, 567-571, doi: 10.1038/s41586-020-2622-0 (2020)).

[0315] Single cell sequencing is a powerful technology for immune and gene expression profiling, which has been utilized for mapping immune responses to COVID-19 infection. To gain insights on the transcriptional landscape of the immune cells and clonal repertoire changes specifically in B and T cells, single cell transcriptomics as well as BCR and TCR repertoire sequencing were performed. The single cell transcriptomics data revealed a systematic landscape of immune cell populations in B.1.351-LNP-mRNA and B.1.617-LNP-mRNA vaccinated animals. The repertoires and associated global gene expression status of the immune populations including B cells, T cells, and innate immune cells were mapped out. From the overall splenocyte population, a distinct and significant increase in the CD8 T cell populations in vaccinated animals was observed. Interestingly, differential expression between vaccinated and placebo-treated animals showed a strong signature of increased expression of transcriptional and translational machinery in both B and T cells. These phenomena potentially reflect the active proliferation and immune responses in these lymphocytes.

[0316] BCR and TCR sequencing are efficient tools for mapping of clonal repertoire diversity, which has been utilized for sequencing COVID-19 patients. BCR-seq and TCR-seq unveiled the diversity and clonality and respective shifts in variant-specific LNP-mRNA inoculated animals as compared to placebo-treated. The decrease in VDJ clonal diversity, along with clonal expansion of a small number of clones, were observed in vaccinated animals as compared to placebo group. Vaccinated animals from both B.1.351-LNP-mRNA and B.1.617-LNP-mRNA groups showed clonal TCR expansion, especially pronounced in peripheral blood samples. The induction of diverse and expanding clones is a signature of vaccine induced protective immunity.

[0317] This study provides direct assessment of in vivo immune responses to vaccination using LNP-mRNAs encoding specific SARS-CoV-2 variant spikes in pre-clinical animal models. The single cell and bulk VDJ repertoire mapping also provide unbiased datasets and robust systems immunology of SARS-CoV-2 vaccination by LNP-mRNA specifically encoding B.1.351 and B.1.617 spikes. These data provide valuable insights for the development of the next-generation COVID-19 vaccines against the SARS-CoV-2 pathogen and especially its emerging variants of concern. Furthermore, the multiplexed and chimeric vaccines provide compositions and methods for vaccination protection against other pathogenic coronaviruses such as MERS-CoV and SARS-CoV, while the vaccine designs can be broadly applicable to other emerging pathogenic coronaviruses.

### Example 4: AI/ML-Powered Vaccine Antigen Design, and Development of AAV and Virus-Like Particle (VLP) Vaccine

### Materials and Methods:

### Artificial Intelligence (AI)/Machine Learning (ML)

[0318] Artificial intelligence (AI)/machine learning (ML) based vaccine design pipelines were developed, in order to identify the pathogenic and/or immunogenic regions in the coronavirus genomes, and to enhance vaccine antigen design for next-gen coronavirus vaccine candidates.

[0319] A total of 3,665 complete nucleotide genomes of the “Coronaviridae” family were downloaded from the Virus Pathogen Database and Analysis Resource (ViPR) database (Pickett et al., 2012) to be used for machine learning algorithm training. Genbank accession MN908947 was used as the reference SARS-CoV-2 sequence for downstream analyses. Coronavirus protein sequences for spike protein (YP_009755834, ACN89696, ABD75577, QIQ54048, QHR63300, QHD43416, QDF43825, ATO98157, AAP13441, ASO66810, ALD51904, AYF53093, AKG92640, ALA50214, AFD98757, AJP67426, AHX26163, AVM80492) and ORF1ab (QIT08254, QJE38280, QJD07686, QHR63299, QIA48640, QDF43824, AAP13442, QCC20711, AJD81438, AHE78095, ATP66760, ABD75543, YP_009019180, AVM80693, AFU92121, AFD98805, APZ73768, ATP66783, YP 002308496) used for evolutionary analyses were obtained from the NCBI Virus community portal. Amino acid sequences for SARS-CoV-2 were obtained from translations from reference sequence NC_045512 (equivalent to MN908947). FASTA sequences for S protein (YP_009724390), E protein (YP_009724392), M protein (YP_009724393), N protein (YP_009724397), NSP3 (YP_009742610), NSP5 (YP_009742612), NSP8 (YP_009742615), NSP9 (YP_009742616), and NSP12 (YP_009725307) were obtained from the NCBI Protein database and were used for downstream evolutionary and immune epitope analyses.

### Pre-Processing

[0320] Sequences were aligned with MAFFT (Katoh et al., 2019) version 7 with the—auto strategy. Degenerate IUPAC base symbols that represent multiple bases were converted to “N” and ultimately masked prior to training algorithms. Six bp-wide sliding windows with 1 bp shifts were generated across every position in the alignment for a total of 100,835 alignment-tiled windows. Genetic features including nucleotides and gaps for a given window were converted to binary vector representations using LabelEncoder and OneHotEncoder from the Python scikit-learn library (Pedregosa et al., 2011), for integer encoding of labels and one-hot encoding respectively. Additional Python libraries used include BioPython (Cock et al., 2009), NumPy (van der Walt et al., 2011), and pandas (Mckinney, 2010).

### Principal Components Analysis

[0321] Dimensionality reduction of encoded whole coronavirus genomes was performed primarily using R scripts. The MSA was converted to cell-based representations in a CSV file, followed by one hot encoding, PCA, and visualization with metadata labelling. One hot encoding with performed with the “mltools” R package and PCA was performed with the “prcomp” R functio

### Training and Evaluating Machine Learning Base Models

[0322] Genome metadata was converted to binary vector classifications with “1” representing predictor class genomes depending on classification strategy and “0” representing all other genomes. Three different classification strategies were used: (1) predictor class containing coronavirus samples infecting human hosts, (2) predictor class containing all SARS-CoV-2, SARS-CoV, and MERS-CoV samples, and (3) predictor class containing SARS-CoV-2, SARS-CoV, and MERS-CoV samples specifically infecting human hosts. Five supervised learning classifiers from scikit-learn were used for training and evaluation, with seeds set at 17 for algorithms that use a random number generator. Support vector classifiers (SVC) were trained with a linear kernel and regularization parameter of 1.0; random forest (RF) classifiers were trained with 100 estimators; Bernoulli Naïve Bayes (BNB) were trained with alpha of 1.0 with the “fit_prior” parameter set as true to learn class prior probabilities; multi-layer perceptron (MLPC) classifiers were trained with “lbfgs” solver, alpha of 1e-5, 5 neurons in the first hidden layer, and 2 neurons in the second hidden layer; gradient boosting classifiers (GBC) were trained with “deviance” loss function, learning rate of 0.1, and 100 estimators. All estimators were trained and evaluated with stratified 5-fold cross-validation on each window, using 80% of the data for training and 20% of the data for validation.

### Statistical Hypothesis Test-Based Meta-Model

[0323] Accuracy scores obtained from machine learning base models were used as a proxy for “learned, predictive information content” to determine coronavirus pathogenicity (COPA) scores using a statistical hypothesis test-based meta-model. First, Shannon entropy values were calculated for each window across the alignment. Windows with minimal entropy values (n=10,383), typically found in highly gapped regions, were used to define a biologically meaningful control group; i.e., it was hypothesized that windows with low information content in highly gapped regions should not be predictive of coronavirus pathogenicity and should have minimal discriminative value. For each position across the alignment (100,840 positions), scores associated with windows that overlap with the position (typically ˜six windows) were pooled and tested to see if statistically significantly different from the minimal entropy control group using the nonparametric two-sided Wilcoxon rank-sum test. For the main NT-COPA score calculations and evolution-based analyses, all scores across the three classification strategies were used for testing; in supplemental analyses, scores for individual classification strategies were used separately. This procedure was performed across the alignment, and p-values were adjusted for multiple comparisons using the Benjamini & Hochberg procedure. P-values were transformed to nucleotide resolution coronavirus pathogenicity scores by negative log base 10 (also referred to as NT-COPA scores). Amino acid resolution scores were obtained by averaging the NT-COPA scores for a given residue's codon (referred to simply as COPA scores).

### Kernel Regression Smoothing for Hotspot Peak Identification

[0324] For a systematic strategy to identify pathogenicity hotspots across the SARS-CoV-2 genome using COPA scores, kernel regression smoothing combined with local maxima identification was used. For each position across the alignment, the Nadaraya-Watson kernel regression estimate was determined using the ksmooth function in R with a “normal” kernel and various bandwidth sizes. Peaks highlighted in this study are primarily based on estimates calculated with bandwidth size of 3. Local peaks were determined from kernel regression estimates using the “findpeaks” function with nups parameter set at 2, from the “pracma” R package.

### Evolutionary Analyses

[0325] Protein sequences used for evolutionary analyses were aligned using MAFFT version 7 with the “L-INS-i” strategy (Katoh et al., 2019). Alignments were visualized using Jalview 2.11.1.0 (Waterhouse et al., 2009). Phylogenic analyses were performed using MEGA10.1.8 software (Kumar et al., 2018). Phylogeny trees were generated with the Maximum Likelihood statistical method, Jones-Taylor-Thornton (JTT) substitution model, uniform rates among sites, use of all sites, Nearest-Neighbor-Interchange (NNI) heuristic method, and default NJ/BioNJ initial tree. For spike protein analysis, all obtained sequences were used for alignment and phylogeny. For NSP12 analysis, all obtained ORF1ab sequences and reference SARS-CoV-2 NSP12 (YP_009725307) were used for alignment, but only ORF1ab sequences were used for phylogeny.

[0326] For large scale phylogenetic analysis, efficient tree inference on the full genome set multiple sequence alignment was performed using IQ-TREE version 2.0.6 (Minh et al., 2020) with the GTR+F+R10 model, which was selected automatically using ModelFinder (Kalyaanamoorthy et al., 2017). Circular phylogenetic trees were then generated for visualization and labelled using FigTree v1.4.4.

### Structural Analyses

[0327] The crystal structure of SARS-CoV-2 spike receptor-binding domain bound with ACE2 was obtained from Protein Data Bank (PDB) with accession code 6M0J (Lan et al., 2020). The cryo-EM structure of the SARS-CoV-2 NSP12-NSP7-NSP8 complex bound to the template-primer RNA and the triphosphate form of remdesivir (RTP) was obtained from PDB with accession code 7BV2 (Yin et al., 2020). The crystal structure of SARS-CoV spike RBD bound with ACE2 was obtained from PDB with accession code 2AJF (Li et al., 2005). Molecular graphics and analyses including mapping of COPA scores onto structures were performed with UCSF ChimeraX version 0.94 (Goddard et al., 2018).

### B Cell Epitope Analysis

[0328] FASTA sequences for reference SARS-CoV-2 structural proteins were used to predict B cell epitopes. Linear B-cell epitopes probability scores were obtained using BepiPred-2.0 (Jespersen et al., 2017). “Consensus Regions” were defined as amino acid residues with epitope scores>0.5 and COPA scores>8. Hypergeometric test of overlap of high COPA score (>8) and high epitope score (>0.5) residues was performed to determine the statistical significance of consensus regions. “Compound Regions” were identified using k-means clustering. Briefly, the R function “kmeans” was run with variable number of clusters and nstart parameter 25 on a dataset containing residue position, epitope score, and COPA score. Residues were marked as compound regions if they belonged to clusters with epitope score centers>0.5 and COPA score centers>8. Flagged residues that did not belong to a contiguous run of amino acids≥5 residues were filtered out.

### T Cell Epitope Analysis

[0329] FASTA sequences for reference SARS-CoV-2 structural proteins and select nonstructural proteins were used to predict T cell epitopes. Prediction of peptides binding to MHC class I and class II molecules was then performed using TepiTool (Paul et al., 2016) from the Immune Epitope Database (IEDB) Analysis Resource. MHC-I binder predictions were made for the “Human” host species and the 27 most frequent A & B alleles in the global population. Default settings for low number of peptides (only 9mer peptides), IEDB recommended prediction method, and predicted percentile rank cutoff≤1.0 were used for peptide selection. MHC-II binder predictions were made for the “Human” host species using the “7-allele method” (median of percentile ranks from DRB1*03:01, DRB1*07:01, DRB1*15:01, DRB3*01:01, DRB3*02:02, DRB4*01:01, DRB5*01:01). Median consensus percentile rank≤20.0 was used for peptide selection. Pathogenicity associated peaks within the proteins with NT-COPA scores greater than 8 were then mapped to the predicted peptides for prioritization.

### Vaccine Antigen Design

[0330] Based on the analyses above using coronavirus genomics and AI/ML, the identified regions, with considerations on (i) pathogenicity, (ii) B cell epitopes and (iii) T cell epitopes, were fed into the antigen design. These resulting vaccine antigen designs were synthesized as gBlocks, and cloned into vaccine vectors, e.g., mRNA vector or viral vector.

[0331] Amino acid sequences of the designed antigens are as follows:

pJP61 antigen
(SEQ ID NO: 18)
MVNCTEVPVAIHADQLTPTWRVYSTGSNVFQTAAYNGTITVEELKKLLEQ
AAYYVYSRVKNLNSSRVPDLLVAAYNGPQNQRNAPRITFGGPSDSTGSNQ
NGERSGARSKQRRPQGLPNNAAYYQTQTNSPRRARSVASQSIIAYTMSLG
AENSVAYSNNSIAAYEVRQIAPGQTGKIADYNYKAAYKLGASQRVAGDSG
FAAYSRYRIGNYKAAYDAYKTFPPTEPKKDKKKKADETQALPQRQKKQQT
VTLLAAYGKQGNFKNLREFVEKNIDGYFKIYSKHAAYHHHHHH
pJP62 antigen
(SEQ ID NO: 19)
MFVFLVLLPLAAYNLIDSYFVVAAYLLLDRLNQLAAYKLLEQWNLVAAYV
LLFLAFVVAAYLLSAGIFGAAAYVLAWLYAAVAAYALWEIQQVVAAYTMA
DLVYALAAYFLWLLWPVTAAYFLAFVVFLLAAYFLKKDAPYIAAYFLNRF
TTTLAAYLLMPILTLTAAYKIADYNYKLAAYFTISVTTEIAAYFVLAAVY
RIAAYYLATALLTLAAYHHHHHH
pJP63 antigen
(SEQ ID NO: 20)
MTQDLFLPFFSNVTWFAAYDGVPFVVSTGYHFREAAYDDQIGYYRRATRR
IRAAYWICLLQFAYANRNRFAAYSVLLFLAFVVFLLVTAAYNEFACVVAD
AVIKTLAAYDLLIRKSNHNFLVQAAAYAIASEFSSLPSYAAFAAYKYLYF
IKGLNNLNRGAAYLLLLDRLNQLESKMSAAYMWLSYFIASFRLFARAAYE
FVFKNIDGYFKIYSAAYFHQKLLKSIAATRGAAAYFLLVTLAILTALRLC
AAYSGYLKLTDNVYIKNAAAYPLNIIPLTTAAKLMVAAYHHHHHH
pJP64 antigen
(SEQ ID NO: 21)
MTPINLVRDLPQGESALEPLVAAYLNQLESKMSGKGQQQQGQTVTKKSAA
EASKKPRQKRTATKAYNVTQAFGRRGPEQTQAAYYLQPRTFLLAAYLPFF
SNVTWFHAIHVAAYDAALALLLLDRLNQLAAYFLFLTWICLAAYNRNRFL
YIIKLIFLWAAYSEETGTLIVNSVLLFAAYTNGTKRFDNPVLPFNAAYHG
KEDLKFPRGQGVPINTNSSPDDQIGYYRRATRRIAAYSVLLELAFVAAYR
FPNITNLCPFGEVFNATRFAAYTLACFVLAAVYRINWAAYFLLVTLAILA
AYHHHHHH
pJP65 antigen
(SEQ ID NO: 22)
MCNDPFLGVYYHKNNKSWMESEFRVAAYDLDDFSKQLQQSMSSADSTAAY
SLLIVNNATNVVIKVAAYNLLKDCPAVAAYFHQKLLKSIAATRGAAAYVV
QTIEVNSFSGYLKAAYYKFVRIQPGQTFSVLAAYAKLMVVIPDYNTYKNA
AYVLKLKVDTANPKTPKAAYTGIAVEQDKNTQEVFAQVKQIYKTPPIKDF
GGFNFSQILPDPSKPSKRSFIEDLLFNKVTLADAGFIKQYGDCLAAYRGM
VLGSLAATVRLQAAYALAYYNTTKAAYPTVVVNAANVYLKHGAAYHHHHH
H

[0332] In an example, the antigens were cloned into AAV vectors, packaged, and tittered by qPCR and functional transduction tests using fluorescence scope and FACS (see FIGS. 11B-11C). The reporter AAV-GFP was tested in parallel to validate the functionality of the AAV vectors.

### Results

[0333] Artificial intelligence (AI)/machine learning (ML) based vaccine design pipelines were developed. The AI/ML algorithms identify the pathogenic and/or immunogenic regions in the coronavirus genomes, to enhance vaccine antigen design for next-gen coronavirus vaccine candidates. In this setting, the vaccine antigen design was performed using AI/ML-powered algorithms. The antigens were created as synthetic constructs, sub-cloned into expression vectors, such as AAV or VLP (these antigens can also be used in mRNA vaccine formulation). Results of qPCR titration of representative AAV vaccine candidate preps showed that these AAVs encoding the vaccine antigens can be produced. Results of imaging or flow-based functional titration also showed the positivity of packaged AAVs (see FIGS. 11A-11D).

Vaccine Cellular Assay System was Generated and AAV/VLP Vaccine Candidates were Tested.

[0334] MHC-I and MHC-II scores of antigens were predicted similar to above. A cellular hACE2 system was established for antigen testing. The hACE2 system is a quantitative immunostaining approach for estimating reactive cells to Spike antigen. FACS-based quantification of Spike-specific B cell populations was performed on the splenocyte samples of the AAV vaccine injected animals in vivo, showing positive response of antigen-specific B cells. FACS-based quantification of vaccine-induced antigen-specific IFNg+CD8 T cell populations in vivo also showed positive antigen-specific T cells. FACS-based quantification of IL7RA+ and CD44+IL7RA+CD62L+T cells in vivo showed the existence of memory T cells (see FIG. 12).

PVP22b SA Hexapro UTR
(SEQ ID NO: 61)
gacggatcgggagatctcccgatcccctatggtgcactctcagtacaatctgctctgatgccgcatag
ttaagccagtatctgctccctgcttgtgtgttggaggtcgctgagtagtgcgcgagcaaaatttaagc
tacaacaaggcaaggcttgaccgacaattgcatgaagaatctgcttagggttaggcgttttgcgctgc
ttcgcgatgtacgggccagatatacgcgttgacattgattattgactagttattaatagtaatcaatt
acggggtcattagttcatagcccatatatggagttccgcgttacataacttacggtaaatggcccgcc
tggctgaccgcccaacgacccccgcccattgacgtcaataatgacgtatgttcccatagtaacgccaa
tagggactttccattgacgtcaatgggtggagtatttacggtaaactgcccacttggcagtacatcaa
gtgtatcatatgccaagtacgccccctattgacgtcaatgacggtaaatggcccgcctggcattatgc
ccagtacatgaccttatgggactttcctacttggcagtacatctacgtattagtcatcgctattacca
tggtgatgcggttttggcagtacatcaatgggcgtggatagcggtttgactcacggggatttccaagt
ctccaccccattgacgtcaatgggagtttgttttggcaccaaaatcaacgggactttccaaaatgtcg
taacaactccgccccattgacgcaaatgggcggtaggcgtgtacggtgggaggtctatataagcagag
ctctctggctaactagagaacccactgcttactggcttatcgaaattaatacgactcactatagggag
acccaagctggctagccaccGAGAATAAACTAGTATTCTTCTGGTCCCCACAGACTCAGAGAGAACCC
GCCACCATgTTTGTGTTCCTGGTGCTGCTGCCACTGGTGTCCAGCCAGTGTGTGAACTTCACCACCAG
GACCCAACTTCCTCCTGCCTACACCAACTCCTTCACCAGGGGAGTCTACTACCCTGACAAGGTGTTCA
GGTCCTCTGTGCTGCACAGCACCCAGGACCTGTTCCTGCCATTCTTCAGCAATGTGACCTGGTTCCAT
GCCATCCATGTGTCTGGCACCAATGGCACCAAGAGGTTTGCCAACCCTGTGCTGCCATTCAATGATGG
AGTCTACTTTGCCAGCACAGAGAAGAGCAACATCATCAGGGGCTGGATTTTTGGCACCACCCTGGACA
GCAAGACCCAGTCCCTGCTGATTGTGAACAATGCCACCAATGTGGTGATTAAGGTGTGTGAGTTCCAG
TTCTGTAATGACCCATTCCTGGGAGTCTACTACCACAAGAACAACAAGTCCTGGATGGAGTCTGAGTT
CAGGGTCTACTCCTCTGCCAACAACTGTACCTTTGAATATGTGAGCCAACCATTCCTGATGGACTTGG
AGGGCAAGCAGGGCAACTTCAAGAACCTGAGGGAGTTTGTGTTCAAGAACATTGATGGCTACTTCAAG
ATTTACAGCAAACACACACCAATCAACCTGGTGAGGGGCCTGCCACAGGGCTTCTCTGCCTTGGAACC
ACTGGTGGACCTGCCAATTGGCATCAACATCACCAGGTTCCAGACCCTGCTGGCTCTGCACATTTCCT
ACCTGACACCTGGAGACTCCTCCTCTGGCTGGACAGCAGGAGCAGCAGCCTACTATGTGGGCTACCTC
CAACCAAGGACCTTCCTGCTGAAATACAATGAGAATGGCACCATCACAGATGCTGTGGACTGTGCCCT
GGACCCACTGTCTGAGACCAAGTGTACCCTGAAATCCTTCACAGTGGAGAAGGGCATCTACCAGACCA
GCAACTTCAGGGTCCAACCAACAGAGAGCATTGTGAGGTTTCCAAACATCACCAACCTGTGTCCATTT
GGAGAGGTGTTCAATGCCACCAGGTTTGCCTCTGTCTATGCCTGGAACAGGAAGAGGATTAGCAACTG
TGTGGCTGACTACTCTGTGCTCTACAACTCTGCCTCCTTCAGCACCTTCAAGTGTTATGGAGTGAGCC
CAACCAAACTGAATGACCTGTGTTTCACCAATGTCTATGCTGACTCCTTTGTGATTAGGGGAGATGAG
GTGAGACAGATTGCCCCTGGACAAACAGGCAACATTGCTGACTACAACTACAAACTGCCTGATGACTT
CACAGGCTGTGTGATTGCCTGGAACAGCAACAACCTGGACAGCAAGGTGGGAGGCAACTACAACTACC
TCTACAGACTGTTCAGGAAGAGCAACCTGAAACCATTTGAGAGGGACATCAGCACAGAGATTTACCAG
GCTGGCAGCACACCATGTAATGGAGTGAAGGGCTTCAACTGTTACTTTCCACTCCAATCCTATGGCTT
CCAACCAACCTACGGAGTGGGCTACCAACCATACAGGGTGGTGGTGCTGTCCTTTGAACTGCTCCATG
CCCCTGCCACAGTGTGTGGACCAAAGAAGAGCACCAACCTGGTGAAGAACAAGTGTGTGAACTTCAAC
TTCAATGGACTGACAGGCACAGGAGTGCTGACAGAGAGCAACAAGAAGTTCCTGCCATTCCAACAGTT
TGGCAGGGACATTGCTGACACCACAGATGCTGTGAGGGACCCACAGACCTTGGAGATTCTGGACATCA
CACCATGTTCCTTTGGAGGAGTGTCTGTGATTACACCTGGCACCAACACCAGCAACCAGGTGGCTGTG
CTCTACCAGGATGTGAACTGTACTGAGGTGCCTGTGGCTATCCATGCTGACCAACTTACACCAACCTG
GAGGGTCTACAGCACAGGCAGCAATGTGTTCCAGACCAGGGCTGGCTGTCTGATTGGAGCAGAGCATG
TGAACAACTCCTATGAGTGTGACATCCCAATTGGAGCAGGCATCTGTGCCTCCTACCAGACCCAGACC
AACAGCCCAGGCTCTGCATCTTCTGTGGCAAGCCAGAGCATCATTGCCTACACAATGAGTCTGGGAGT
GGAGAACTCTGTGGCTTACAGCAACAACAGCATTGCCATCCCAACCAACTTCACCATCTCTGTGACCA
CAGAGATTCTGCCTGTGAGTATGACCAAGACCTCTGTGGACTGTACAATGTATATCTGTGGAGACAGC
ACAGAGTGTAGCAACCTGCTGCTCCAATATGGCTCCTTCTGTACCCAACTTAACAGGGCTCTGACAGG
CATTGCTGTGGAACAGGACAAGAACACCCAGGAGGTGTTTGCCCAGGTGAAGCAGATTTACAAGACAC
CTCCAATCAAGGACTTTGGAGGCTTCAACTTCAGCCAGATTCTGCCTGACCCAAGCAAGCCAAGCAAG
AGGTCCCCTATTGAGGACCTGCTGTTCAACAAGGTGACCCTGGCTGATGCTGGCTTCATCAAGCAATA
TGGAGACTGTCTGGGAGACATCGCTGCTAGGGACCTGATTTGTGCCCAGAAGTTCAATGGACTGACAG
TGCTGCCTCCACTGCTGACAGATGAGATGATTGCCCAATACACCTCTGCCCTGCTGGCTGGAACCATC
ACCTCTGGATGGACCTTTGGAGCAGGACCAGCCCTCCAAATCCCATTTCCAATGCAGATGGCTTACAG
GTTCAATGGCATTGGAGTGACCCAGAATGTGCTCTATGAGAACCAGAAACTGATTGCCAACCAGTTCA
ACTCTGCCATTGGCAAGATTCAGGACTCCCTGTCCAGCACACCATCTGCCCTGGGCAAGCTCCAAGAT
GTGGTGAACCAGAATGCCCAGGCTCTGAACACCCTGGTGAAGCAACTTTCCAGCAACTTTGGAGCCAT
CTCCTCTGTGCTGAATGACATCCTGAGCAGACTGGACCCACCAGAGGCTGAGGTCCAGATTGACAGAC
TGATTACAGGCAGACTCCAATCCCTCCAAACCTATGTGACCCAACAACTTATCAGGGCTGCTGAGATT
AGGGCATCTGCCAACCTGGCTGCCACCAAGATGAGTGAGTGTGTGCTGGGACAAAGCAAGAGGGTGGA
CTTCTGTGGCAAGGGCTACCACCTGATGAGTTTTCCACAGTCTGCCCCTCATGGAGTGGTGTTCCTGC
ATGTGACCTATGTGCCTGCCCAGGAGAAGAACTTCACCACAGCCCCTGCCATCTGCCATGATGGCAAG
GCTCACTTTCCAAGGGAGGGAGTGTTTGTGAGCAATGGCACCCACTGGTTTGTGACCCAGAGGAACTT
CTATGAACCACAGATTATCACCACAGACAACACCTTTGTGTCTGGCAACTGTGATGTGGTGATTGGCA
TTGTGAACAACACAGTCTATGACCCACTCCAACCTGAACTGGACTCCTTCAAGGAGGAACTGGACAAA
TACTTCAAGAACCACACCAGCCCTGATGTGGACCTGGGAGACATCTCTGGCATCAATGCCTCTGTGGT
GAACATCCAGAAGGAGATTGACAGACTGAATGAGGTGGCTAAGAACCTGAATGAGTCCCTGATTGACC
TCCAAGAACTGGGCAAATATGAACAATACATCAAGTGGCCATGGTACATCTGGCTGGGCTTCATTGCT
GGACTGATTGCCATTGTGATGGTGACCATAATGCTGTGTTGTATGACCTCCTGTTGTTCCTGTCTGAA
AGGCTGTTGTTCCTGTGGCTCCTGTTGTAAGTTTGATGAGGATGACTCTGAACCTGTGCTGAAAGGAG
TGAAACTGCACTACACCTGATGACTCGAGCTGGTACTGCATGCACGCAATGCTAGCTGCCCCTTTCCC
GTCCTGGGTACCCCGAGTCTCCCCCGACCTCGGGTCCCAGGTATGCTCCCACCTCCACCTGCCCCACT
CACCACCTCTGCTAGTTCCAGACACCTCCCAAGCACGCAGCAATGCAGCTCAAAACGCTTAGCCTAGC
CACACCCCCACGGGAAACAGCAGTGATTAACCTTTAGCAATAAACGAAAGTTTAACTAAGCTATACTA
ACCCCAGGGTTGGTCAATTTCGTGCCAGCCACACCCTGGAGCTAGCaaaccgctgatcagcctcgact
gtgccttctagttgccagccatctgttgtttgcccctcccccgtgccttccttgaccctggaaggtgc
cactcccactgtcctttcctaataaaatgaggaaattgcatcgcattgtctgagtaggtgtcattcta
ttctggggggtggggtggggcaggacagcaagggggaggattgggaagacaatagcaggcatgctggg
gatgcggtgggctctatggcttctgaggcggaaagaaccagctggggctctagggggtatccccacgc
gccctgtagcggcgcattaagcgcggcgggtgtggtggttacgcgcagcgtgaccgctacacttgcca
gcgccctagcgcccgctcctttcgctttcttcccttcctttctcgccacgttcgccggctttccccgt
caagctctaaatcgggggctccctttagggttccgatttagtgctttacggcacctcgaccccaaaaa
acttgattagggtgatggttcacgtagtgggccatcgccctgatagacggtttttcgccctttgacgt
tggagtccacgttctttaatagtggactcttgttccaaactggaacaacactcaaccctatctcggtc
tattcttttgatttataagggattttgccgatttcggcctattggttaaaaaatgagctgatttaaca
aaaatttaacgcgaattaattctgtggaatgtgtgtcagttagggtgtggaaagtccccaggctcccc
agcaggcagaagtatgcaaagcatgcatctcaattagtcagcaaccaggtgtggaaagtccccaggct
ccccagcaggcagaagtatgcaaagcatgcatctcaattagtcagcaaccatagtcccgcccctaact
ccgcccatcccgcccctaactccgcccagttccgcccattctccgccccatggctgactaattttttt
tatttatgcagaggccgaggccgcctctgcctctgagctattccagaagtagtgaggaggcttttttg
gaggcctaggcttttgcaaaaagctcccgggagcttgtatatccattttcggatctgatcaagagaca
ggatgaggatcgtttcgcatgattgaacaagatggattgcacgcaggttctccggccgcttgggtgga
gaggctattcggctatgactgggcacaacagacaatcggctgctctgatgccgccgtgttccggctgt
cagcgcaggggcgcccggttctttttgtcaagaccgacctgtccggtgccctgaatgaactgcaggac
gaggcagcgcggctatcgtggctggccacgacgggcgttccttgcgcagctgtgctcgacgttgtcac
tgaagcgggaagggactggctgctattgggcgaagtgccggggcaggatctcctgtcatctcaccttg
ctcctgccgagaaagtatccatcatggctgatgcaatgcggcggctgcatacgcttgatccggctacc
tgcccattcgaccaccaagcgaaacatcgcatcgagcgagcacgtactcggatggaagccggtcttgt
cgatcaggatgatctggacgaagagcatcaggggctcgcgccagccgaactgttcgccaggctcaagg
cgcgcatgcccgacggcgaggatctcgtcgtgacccatggcgatgcctgcttgccgaatatcatggtg
gaaaatggccgcttttctggattcatcgactgtggccggctgggtgtggcggaccgctatcaggacat
agcgttggctacccgtgatattgctgaagagcttggcggcgaatgggctgaccgcttcctcgtgcttt
acggtatcgccgctcccgattcgcagcgcatcgccttctatcgccttcttgacgagttcttctgagcg
ggactctggggttcgaaatgaccgaccaagcgacgcccaacctgccatcacgagatttcgattccacc
gccgccttctatgaaaggttgggcttcggaatcgttttccgggacgccggctggatgatcctccagcg
cggggatctcatgctggagttcttcgcccaccccaacttgtttattgcagcttataatggttacaaat
aaagcaatagcatcacaaatttcacaaataaagcatttttttcactgcattctagttgtggtttgtcc
aaactcatcaatgtatcttatcatgtctgtataccgtcgacctctagctagagcttggcgtaatcatg
gtcatagctgtttcctgtgtgaaattgttatccgctcacaattccacacaacatacgagccggaagca
taaagtgtaaagcctggggtgcctaatgagtgagctaactcacattaattgcgttgcgctcactgccc
gctttccagtcgggaaacctgtcgtgccagctgcattaatgaatcggccaacgcgcggggagaggcgg
tttgcgtattgggcgctcttccgcttcctcgctcactgactcgctgcgctcggtcgttcggctgcggc
gagcggtatcagctcactcaaaggcggtaatacggttatccacagaatcaggggataacgcaggaaag
aacatgtgagcaaaaggccagcaaaaggccaggaaccgtaaaaaggccgcgttgctggcgtttttcca
taggctccgcccccctgacgagcatcacaaaaatcgacgctcaagtcagaggtggcgaaacccgacag
gactataaagataccaggcgtttccccctggaagctccctcgtgcgctctcctgttccgaccctgccg
cttaccggatacctgtccgcctttctcccttcgggaagcgtggcgctttctcatagctcacgctgtag
gtatctcagttcggtgtaggtcgttcgctccaagctgggctgtgtgcacgaaccccccgttcagcccg
accgctgcgccttatccggtaactatcgtcttgagtccaacccggtaagacacgacttatcgccactg
gcagcagccactggtaacaggattagcagagcgaggtatgtaggcggtgctacagagttcttgaagtg
gtggcctaactacggctacactagaagaacagtatttggtatctgcgctctgctgaagccagttacct
tcggaaaaagagttggtagctcttgatccggcaaacaaaccaccgctggtagcggtggtttttttgtt
tgcaagcagcagattacgcgcagaaaaaaaggatctcaagaagatcctttgatcttttctacggggtc
tgacgctcagtggaacgaaaactcacgttaagggattttggtcatgagattatcaaaaaggatcttca
cctagatccttttaaattaaaaatgaagttttaaatcaatctaaagtatatatgagtaaacttggtct
gacagttaccaatgcttaatcagtgaggcacctatctcagcgatctgtctatttcgttcatccatagt
tgcctgactccccgtcgtgtagataactacgatacgggagggcttaccatctggccccagtgctgcaa
tgataccgcgagacccacgctcaccggctccagatttatcagcaataaaccagccagccggaagggcc
gagcgcagaagtggtcctgcaactttatccgcctccatccagtctattaattgttgccgggaagctag
agtaagtagttcgccagttaatagtttgcgcaacgttgttgccattgctacaggcatcgtggtgtcac
gctcgtcgtttggtatggcttcattcagctccggttcccaacgatcaaggcgagttacatgatccccc
atgttgtgcaaaaaagcggttagctccttcggtcctccgatcgttgtcagaagtaagttggccgcagt
gttatcactcatggttatggcagcactgcataattctcttactgtcatgccatccgtaagatgctttt
ctgtgactggtgagtactcaaccaagtcattctgagaatagtgtatgcggcgaccgagttgctcttgc
ccggcgtcaatacgggataataccgcgccacatagcagaactttaaaagtgctcatcattggaaaacg
ttcttcggggcgaaaactctcaaggatcttaccgctgttgagatccagttcgatgtaacccactcgtg
cacccaactgatcttcagcatcttttactttcaccagcgtttctgggtgagcaaaaacaggaaggcaa
aatgccgcaaaaaagggaataagggcgacacggaaatgttgaatactcatactcttcctttttcaata
ttattgaagcatttatcagggttattgtctcatgagcggatacatatttgaatgtatttagaaaaata
aacaaataggggttccgcgcacatttccccgaaaagtgccacctgacgtc
PVP28 pcDNA3.1 Indian B.1.617
(SEQ ID NO: 62)
gacggatcgggagatctcccgatcccctatggtgcactctcagtacaatctgctctgatgccgcatag
ttaagccagtatctgctccctgcttgtgtgttggaggtcgctgagtagtgcgcgagcaaaatttaagc
tacaacaaggcaaggcttgaccgacaattgcatgaagaatctgcttagggttaggcgttttgcgctgc
ttcgcgatgtacgggccagatatacgcgttgacattgattattgactagttattaatagtaatcaatt
acggggtcattagttcatagcccatatatggagttccgcgttacataacttacggtaaatggcccgcc
tggctgaccgcccaacgacccccgcccattgacgtcaataatgacgtatgttcccatagtaacgccaa
tagggactttccattgacgtcaatgggtggagtatttacggtaaactgcccacttggcagtacatcaa
gtgtatcatatgccaagtacgccccctattgacgtcaatgacggtaaatggcccgcctggcattatgc
ccagtacatgaccttatgggactttcctacttggcagtacatctacgtattagtcatcgctattacca
tggtgatgcggttttggcagtacatcaatgggcgtggatagcggtttgactcacggggatttccaagt
ctccaccccattgacgtcaatgggagtttgttttggcaccaaaatcaacgggactttccaaaatgtcg
taacaactccgccccattgacgcaaatgggcggtaggcgtgtacggtgggaggtctatataagcagag
ctctctggctaactagagaacccactgcttactggcttatcgaaattaatacgactcactatagggag
acccaagctggctagccaccATGTTTGTGTTCCTGGTGCTGCTGCCACTGGTGTCCAGCCAGTGTGTG
AACCTGACCACCAGGACCCAACTTCCTCCTGCCTACACCAACTCCTTCACCAGGGGAGTCTACTACCC
TGACAAGGTGTTCAGGTCCTCTGTGCTGCACAGCACCCAGGACCTGTTCCTGCCATTCTTCAGCAATG
TGACCTGGTTCCATGCCATCCATGTGTCTGGCACCAATGGCACCAAGAGGTTTGACAACCCTGTGCTG
CCATTCAATGATGGAGTCTACTTTGCCAGCACAGAGAAGAGCAACATCATCAGGGGCTGGATTTTTGG
CACCACCCTGGACAGCAAGACCCAGTCCCTGCTGATTGTGAACAATGCCACCAATGTGGTGATTAAGG
TGTGTGAGTTCCAGTTCTGTAATGACCCATTCCTGGACGTCTACTACCACAAGAACAACAAGTCCTGG
ATGAAGTCTGAGTTCAGGGTCTACTCCTCTGCCAACAACTGTACCTTTGAATATGTGAGCCAACCATT
CCTGATGGACTTGGAGGGCAAGCAGGGCAACTTCAAGAACCTGAGGGAGTTTGTGTTCAAGAACATTG
ATGGCTACTTCAAGATTTACAGCAAACACACACCAATCAACCTGGTGAGGGACCTGCCACAGGGCTTC
TCTGCCTTGGAACCACTGGTGGACCTGCCAATTGGCATCAACATCACCAGGTTCCAGACCCTGCTGGC
TCTGCACAGGTCCTACCTGACACCTGGAGACTCCTCCTCTGGCTGGACAGCAGGAGCAGCAGCCTACT
ATGTGGGCTACCTCCAACCAAGGACCTTCCTGCTGAAATACAATGAGAATGGCACCATCACAGATGCT
GTGGACTGTGCCCTGGACCCACTGTCTGAGACCAAGTGTACCCTGAAATCCTTCACAGTGGAGAAGGG
CATCTACCAGACCAGCAACTTCAGGGTCCAACCAACAGAGAGCATTGTGAGGTTTCCAAACATCACCA
ACCTGTGTCCATTTGGAGAGGTGTTCAATGCCACCAGGTTTGCCTCTGTCTATGCCTGGAACAGGAAG
AGGATTAGCAACTGTGTGGCTGACTACTCTGTGCTCTACAACTCTGCCTCCTTCAGCACCTTCAAGTG
TTATGGAGTGAGCCCAACCAAACTGAATGACCTGTGTTTCACCAATGTCTATGCTGACTCCTTTGTGA
TTAGGGGAGATGAGGTGAGACAGATTGCCCCTGGACAAACAGGCAAGATTGCTGACTACAACTACAAA
CTGCCTGATGACTTCACAGGCTGTGTGATTGCCTGGAACAGCAACAACCTGGACAGCAAGGTGGGAGG
CAACTACAACTACAGGTACAGACTGTTCAGGAAGAGCAACCTGAAACCATTTGAGAGGGACATCAGCA
CAGAGATTTACCAGGCTGGCAGCACACCATGTAATGGAGTGCAGGGCTTCAACTGTTACTTTCCACTC
CAATCCTATGGCTTCCAACCAACCAATGGAGTGGGCTACCAACCATACAGGGTGGTGGTGCTGTCCTT
TGAACTGCTCCATGCCCCTGCCACAGTGTGTGGACCAAAGAAGAGCACCAACCTGGTGAAGAACAAGT
GTGTGAACTTCAACTTCAATGGACTGACAGGCACAGGAGTGCTGACAGAGAGCAACAAGAAGTTCCTG
CCATTCCAACAGTTTGGCAGGGACATTGCTGACACCACAGATGCTGTGAGGGACCCACAGACCTTGGA
GATTCTGGACATCACACCATGTTCCTTTGGAGGAGTGTCTGTGATTACACCTGGCACCAACACCAGCA
ACCAGGTGGCTGTGCTCTACCAGGGAGTGAACTGTACTGAGGTGCCTGTGGCTATCCATGCTGACCAA
CTTACACCAACCTGGAGGGTCTACAGCACAGGCAGCAATGTGTTCCAGACCAGGGCTGGCTGTCTGAT
TGGAGCAGAGCATGTGAACAACTCCTATGAGTGTGACATCCCAATTGGAGCAGGCATCTGTGCCTCCT
ACCAGACCCAGACCAACAGCAGGAGGAGGGCAAGGTCTGTGGCAAGCCAGAGCATCATTGCCTACACA
ATGAGTCTGGGAGCAGAGAACTCTGTGGCTTACAGCAACAACAGCATTGCCATCCCAACCAACTTCAC
CATCTCTGTGACCACAGAGATTCTGCCTGTGAGTATGACCAAGACCTCTGTGGACTGTACAATGTATA
TCTGTGGAGACAGCACAGAGTGTAGCAACCTGCTGCTCCAATATGGCTCCTTCTGTACCCAACTTAAC
AGGGCTCTGACAGGCATTGCTGTGGAACAGGACAAGAACACCCAGGAGGTGTTTGCCCAGGTGAAGCA
GATTTACAAGACACCTCCAATCAAGGACTTTGGAGGCTTCAACTTCAGCCAGATTCTGCCTGACCCAA
GCAAGCCAAGCAAGAGGTCCTTCATTGAGGACCTGCTGTTCAACAAGGTGACCCTGGCTGATGCTGGC
TTCATCAAGCAATATGGAGACTGTCTGGGAGACATTGCTGCCAGGGACCTGATTTGTGCCCAGAAGTT
CAATGGACTGACAGTGCTGCCTCCACTGCTGACAGATGAGATGATTGCCCAATACACCTCTGCCCTGC
TGGCTGGCACCATCACCTCTGGCTGGACCTTTGGAGCAGGAGCAGCCCTCCAAATCCCATTTGCTATG
CAGATGGCTTACAGGTTCAATGGCATTGGAGTGACCCAGAATGTGCTCTATGAGAACCAGAAACTGAT
TGCCAACCAGTTCAACTCTGCCATTGGCAAGATTCAGGACTCCCTGTCCAGCACAGCCTCTGCCCTGG
GCAAACTCCAAGATGTGGTGAACCAGAATGCCCAGGCTCTGAACACCCTGGTGAAGCAACTTTCCAGC
AACTTTGGAGCCATCTCCTCTGTGCTGAATGACATCCTGAGCAGACTGGACAAGGTGGAGGCTGAGGT
CCAGATTGACAGACTGATTACAGGCAGACTCCAATCCCTCCAAACCTATGTGACCCAACAACTTATCA
GGGCTGCTGAGATTAGGGCATCTGCCAACCTGGCTGCCACCAAGATGAGTGAGTGTGTGCTGGGACAA
AGCAAGAGGGTGGACTTCTGTGGCAAGGGCTACCACCTGATGAGTTTTCCACAGTCTGCCCCTCATGG
AGTGGTGTTCCTGCATGTGACCTATGTGCCTGCCCATGAGAAGAACTTCACCACAGCCCCTGCCATCT
GCCATGATGGCAAGGCTCACTTTCCAAGGGAGGGAGTGTTTGTGAGCAATGGCACCCACTGGTTTGTG
ACCCAGAGGAACTTCTATGAACCACAGATTATCACCACAGACAACACCTTTGTGTCTGGCAACTGTGA
TGTGGTGATTGGCATTGTGAACAACACAGTCTATGACCCACTCCAACCTGAACTGGACTCCTTCAAGG
AGGAACTGGACAAATACTTCAAGAACCACACCAGCCCTGATGTGGACCTGGGAGACATCTCTGGCATC
AATGCCTCTGTGGTGAACATCCAGAAGGAGATTGACAGACTGAATGAGGTGGCTAAGAACCTGAATGA
GTCCCTGATTGACCTCCAAGAACTGGGCAAATATGAACAATACATCAAGTGGCCATGGTACATCTGGC
TGGGCTTCATTGCTGGACTGATTGCCATTGTGATGGTGACCATAATGCTGTGTTGTATGACCTCCTGT
TGTTCCTGTCTGAAAGGCTGTTGTTCCTGTGGCTCCTGTTGTAAGTTTGATGAGGATGACTCTGAACC
TGTGCTGAAAGGAGTGAAACTGCACTACACCTGAggatccgagctcggtaccaagcttaagtttaaac
cgctgatcagcctcgactgtgccttctagttgccagccatctgttgtttgcccctcccccgtgccttc
cttgaccctggaaggtgccactcccactgtcctttcctaataaaatgaggaaattgcatcgcattgtc
tgagtaggtgtcattctattctggggggtggggggggcaggacagcaagggggaggattgggaagac
aatagcaggcatgctggggatgcggtgggctctatggcttctgaggcggaaagaaccagctggggctc
tagggggtatccccacgcgccctgtagcggcgcattaagcgcggcgggtgtggtggttacgcgcagcg
tgaccgctacacttgccagcgccctagcgcccgctcctttcgctttcttcccttcctttctcgccacg
ttcgccggctttccccgtcaagctctaaatcgggggctccctttagggttccgatttagtgctttacg
gcacctcgaccccaaaaaacttgattagggtgatggttcacgtagtgggccatcgccctgatagacgg
tttttcgccctttgacgttggagtccacgttctttaatagtggactcttgttccaaactggaacaaca
ctcaaccctatctcggtctattcttttgatttataagggattttgccgatttcggcctattggttaaa
aaatgagctgatttaacaaaaatttaacgcgaattaattctgtggaatgtgtgtcagttagggtgtgg
aaagtccccaggctccccagcaggcagaagtatgcaaagcatgcatctcaattagtcagcaaccaggt
gtggaaagtccccaggctccccagcaggcagaagtatgcaaagcatgcatctcaattagtcagcaacc
atagtcccgcccctaactccgcccatcccgcccctaactccgcccagttccgcccattctccgcccca
tggctgactaattttttttatttatgcagaggccgaggccgcctctgcctctgagctattccagaagt
agtgaggaggcttttttggaggcctaggcttttgcaaaaagctcccgggagcttgtatatccattttc
ggatctgatcaagagacaggatgaggatcgtttcgcatgattgaacaagatggattgcacgcaggttc
tccggccgcttgggtggagaggctattcggctatgactgggcacaacagacaatcggctgctctgatg
ccgccgtgttccggctgtcagcgcaggggcgcccggttctttttgtcaagaccgacctgtccggtgcc
ctgaatgaactgcaggacgaggcagcgcggctatcgtggctggccacgacgggcgttccttgcgcagc
tgtgctcgacgttgtcactgaagcgggaagggactggctgctattgggcgaagtgccggggcaggatc
tcctgtcatctcaccttgctcctgccgagaaagtatccatcatggctgatgcaatgcggcggctgcat
acgcttgatccggctacctgcccattcgaccaccaagcgaaacatcgcatcgagcgagcacgtactcg
gatggaagccggtcttgtcgatcaggatgatctggacgaagagcatcaggggctcgcgccagccgaac
tgttcgccaggctcaaggcgcgcatgcccgacggcgaggatctcgtcgtgacccatggcgatgcctgc
ttgccgaatatcatggtggaaaatggccgcttttctggattcatcgactgtggccggctgggtgtggc
ggaccgctatcaggacatagcgttggctacccgtgatattgctgaagagcttggcggcgaatgggctg
accgcttcctcgtgctttacggtatcgccgctcccgattcgcagcgcatcgccttctatcgccttctt
gacgagttcttctgagcgggactctggggttcgaaatgaccgaccaagcgacgcccaacctgccatca
cgagatttcgattccaccgccgccttctatgaaaggttgggcttcggaatcgttttccgggacgccgg
ctggatgatcctccagcgcggggatctcatgctggagttcttcgcccaccccaacttgtttattgcag
cttataatggttacaaataaagcaatagcatcacaaatttcacaaataaagcatttttttcactgcat
tctagttgtggtttgtccaaactcatcaatgtatcttatcatgtctgtataccgtcgacctctagcta
gagcttggcgtaatcatggtcatagctgtttcctgtgtgaaattgttatccgctcacaattccacaca
acatacgagccggaagcataaagtgtaaagcctggggtgcctaatgagtgagctaactcacattaatt
gcgttgcgctcactgcccgctttccagtcgggaaacctgtcgtgccagctgcattaatgaatcggcca
acgcgcggggagaggcggtttgcgtattgggcgctcttccgcttcctcgctcactgactcgctgcgct
cggtcgttcggctgcggcgagcggtatcagctcactcaaaggcggtaatacggttatccacagaatca
ggggataacgcaggaaagaacatgtgagcaaaaggccagcaaaaggccaggaaccgtaaaaaggccgc
gttgctggcgtttttccataggctccgcccccctgacgagcatcacaaaaatcgacgctcaagtcaga
ggtggcgaaacccgacaggactataaagataccaggcgtttccccctggaagctccctcgtgcgctct
cctgttccgaccctgccgcttaccggatacctgtccgcctttctcccttcgggaagcgtggcgctttc
tcatagctcacgctgtaggtatctcagttcggtgtaggtcgttcgctccaagctgggctgtgtgcacg
aaccccccgttcagcccgaccgctgcgccttatccggtaactatcgtcttgagtccaacccggtaaga
cacgacttatcgccactggcagcagccactggtaacaggattagcagagcgaggtatgtaggcggtgc
tacagagttcttgaagtggtggcctaactacggctacactagaagaacagtatttggtatctgcgctc
tgctgaagccagttaccttcggaaaaagagttggtagctcttgatccggcaaacaaaccaccgctggt
agcggtggtttttttgtttgcaagcagcagattacgcgcagaaaaaaaggatctcaagaagatccttt
gatcttttctacggggtctgacgctcagtggaacgaaaactcacgttaagggattttggtcatgagat
tatcaaaaaggatcttcacctagatccttttaaattaaaaatgaagttttaaatcaatctaaagtata
tatgagtaaacttggtctgacagttaccaatgcttaatcagtgaggcacctatctcagcgatctgtct
atttcgttcatccatagttgcctgactccccgtcgtgtagataactacgatacgggagggcttaccat
ctggccccagtgctgcaatgataccgcgagacccacgctcaccggctccagatttatcagcaataaac
cagccagccggaagggccgagcgcagaagtggtcctgcaactttatccgcctccatccagtctattaa
ttgttgccgggaagctagagtaagtagttcgccagttaatagtttgcgcaacgttgttgccattgcta
caggcatcgtggtgtcacgctcgtcgtttggtatggcttcattcagctccggttcccaacgatcaagg
cgagttacatgatcccccatgttgtgcaaaaaagcggttagctccttcggtcctccgatcgttgtcag
aagtaagttggccgcagtgttatcactcatggttatggcagcactgcataattctcttactgtcatgc
catccgtaagatgcttttctgtgactggtgagtactcaaccaagtcattctgagaatagtgtatgcgg
cgaccgagttgctcttgcccggcgtcaatacgggataataccgcgccacatagcagaactttaaaagt
gctcatcattggaaaacgttcttcggggcgaaaactctcaaggatcttaccgctgttgagatccagtt
cgatgtaacccactcgtgcacccaactgatcttcagcatcttttactttcaccagcgtttctgggtga
gcaaaaacaggaaggcaaaatgccgcaaaaaagggaataagggcgacacggaaatgttgaatactcat
actcttcctttttcaatattattgaagcatttatcagggttattgtctcatgagcggatacatatttg
aatgtatttagaaaaataaacaaataggggttccgcgcacatttccccgaaaagtgccacctgacgtc
PVP29b Indian B.1.617 Hexapro UTR
(SEQ ID NO: 63)
gacggatcgggagatctcccgatcccctatggtgcactctcagtacaatctgctctgatgccgcatag
ttaagccagtatctgctccctgcttgtgtgttggaggtcgctgagtagtgcgcgagcaaaatttaagc
tacaacaaggcaaggcttgaccgacaattgcatgaagaatctgcttagggttaggcgttttgcgctgc
ttcgcgatgtacgggccagatatacgcgttgacattgattattgactagttattaatagtaatcaatt
acggggtcattagttcatagcccatatatggagttccgcgttacataacttacggtaaatggcccgcc
tggctgaccgcccaacgacccccgcccattgacgtcaataatgacgtatgttcccatagtaacgccaa
tagggactttccattgacgtcaatgggtggagtatttacggtaaactgcccacttggcagtacatcaa
gtgtatcatatgccaagtacgccccctattgacgtcaatgacggtaaatggcccgcctggcattatgc
ccagtacatgaccttatgggactttcctacttggcagtacatctacgtattagtcatcgctattacca
tggtgatgcggttttggcagtacatcaatgggcgtggatagcggtttgactcacggggatttccaagt
ctccaccccattgacgtcaatgggagtttgttttggcaccaaaatcaacgggactttccaaaatgtcg
taacaactccgccccattgacgcaaatgggcggtaggcgtgtacggtgggaggtctatataagcagag
ctctctggctaactagagaacccactgcttactggcttatcgaaattaatacgactcactatagggag
acccaagctggctagccaccGAGAATAAACTAGTATTCTTCTGGTCCCCACAGACTCAGAGAGAACCC
GCCACCATgTTTGTGTTCCTGGTGCTGCTGCCACTGGTGTCCAGCCAGTGTGTGAACCTGACCACCAG
GACCCAACTTCCTCCTGCCTACACCAACTCCTTCACCAGGGGAGTCTACTACCCTGACAAGGTGTTCA
GGTCCTCTGTGCTGCACAGCACCCAGGACCTGTTCCTGCCATTCTTCAGCAATGTGACCTGGTTCCAT
GCCATCCATGTGTCTGGCACCAATGGCACCAAGAGGTTTGACAACCCTGTGCTGCCATTCAATGATGG
AGTCTACTTTGCCAGCACAGAGAAGAGCAACATCATCAGGGGCTGGATTTTTGGCACCACCCTGGACA
GCAAGACCCAGTCCCTGCTGATTGTGAACAATGCCACCAATGTGGTGATTAAGGTGTGTGAGTTCCAG
TTCTGTAATGACCCATTCCTGGACGTCTACTACCACAAGAACAACAAGTCCTGGATGAAGTCTGAGTT
CAGGGTCTACTCCTCTGCCAACAACTGTACCTTTGAATATGTGAGCCAACCATTCCTGATGGACTTGG
AGGGCAAGCAGGGCAACTTCAAGAACCTGAGGGAGTTTGTGTTCAAGAACATTGATGGCTACTTCAAG
ATTTACAGCAAACACACACCAATCAACCTGGTGAGGGACCTGCCACAGGGCTTCTCTGCCTTGGAACC
ACTGGTGGACCTGCCAATTGGCATCAACATCACCAGGTTCCAGACCCTGCTGGCTCTGCACAGGTCCT
ACCTGACACCTGGAGACTCCTCCTCTGGCTGGACAGCAGGAGCAGCAGCCTACTATGTGGGCTACCTC
CAACCAAGGACCTTCCTGCTGAAATACAATGAGAATGGCACCATCACAGATGCTGTGGACTGTGCCCT
GGACCCACTGTCTGAGACCAAGTGTACCCTGAAATCCTTCACAGTGGAGAAGGGCATCTACCAGACCA
GCAACTTCAGGGTCCAACCAACAGAGAGCATTGTGAGGTTTCCAAACATCACCAACCTGTGTCCATTT
GGAGAGGTGTTCAATGCCACCAGGTTTGCCTCTGTCTATGCCTGGAACAGGAAGAGGATTAGCAACTG
TGTGGCTGACTACTCTGTGCTCTACAACTCTGCCTCCTTCAGCACCTTCAAGTGTTATGGAGTGAGCC
CAACCAAACTGAATGACCTGTGTTTCACCAATGTCTATGCTGACTCCTTTGTGATTAGGGGAGATGAG
GTGAGACAGATTGCCCCTGGACAAACAGGCAAGATTGCTGACTACAACTACAAACTGCCTGATGACTT
CACAGGCTGTGTGATTGCCTGGAACAGCAACAACCTGGACAGCAAGGTGGGAGGCAACTACAACTACA
GGTACAGACTGTTCAGGAAGAGCAACCTGAAACCATTTGAGAGGGACATCAGCACAGAGATTTACCAG
GCTGGCAGCACACCATGTAATGGAGTGCAGGGCTTCAACTGTTACTTTCCACTCCAATCCTATGGCTT
CCAACCAACCAATGGAGTGGGCTACCAACCATACAGGGTGGTGGTGCTGTCCTTTGAACTGCTCCATG
CCCCTGCCACAGTGTGTGGACCAAAGAAGAGCACCAACCTGGTGAAGAACAAGTGTGTGAACTTCAAC
TTCAATGGACTGACAGGCACAGGAGTGCTGACAGAGAGCAACAAGAAGTTCCTGCCATTCCAACAGTT
TGGCAGGGACATTGCTGACACCACAGATGCTGTGAGGGACCCACAGACCTTGGAGATTCTGGACATCA
CACCATGTTCCTTTGGAGGAGTGTCTGTGATTACACCTGGCACCAACACCAGCAACCAGGTGGCTGTG
CTCTACCAGGGAGTGAACTGTACTGAGGTGCCTGTGGCTATCCATGCTGACCAACTTACACCAACCTG
GAGGGTCTACAGCACAGGCAGCAATGTGTTCCAGACCAGGGCTGGCTGTCTGATTGGAGCAGAGCATG
TGAACAACTCCTATGAGTGTGACATCCCAATTGGAGCAGGCATCTGTGCCTCCTACCAGACCCAGACC
AACAGCAGGGGCTCTGCATCTTCTGTGGCAAGCCAGAGCATCATTGCCTACACAATGAGTCTGGGAGC
AGAGAACTCTGTGGCTTACAGCAACAACAGCATTGCCATCCCAACCAACTTCACCATCTCTGTGACCA
CAGAGATTCTGCCTGTGAGTATGACCAAGACCTCTGTGGACTGTACAATGTATATCTGTGGAGACAGC
ACAGAGTGTAGCAACCTGCTGCTCCAATATGGCTCCTTCTGTACCCAACTTAACAGGGCTCTGACAGG
CATTGCTGTGGAACAGGACAAGAACACACAGGAGGTGTTTGCCCAGGTGAAGCAGATTTACAAGACAC
CTCCAATCAAGGACTTTGGAGGCTTCAACTTCAGCCAGATTCTGCCTGACCCAAGCAAGCCAAGCAAG
AGGTCCCCTATTGAGGACCTGCTGTTCAACAAGGTGACCCTGGCTGATGCTGGCTTCATCAAGCAATA
TGGAGACTGTCTGGGAGACATTGCTGCCAGGGACCTGATTTGTGCCCAGAAGTTCAATGGACTGACAG
TGCTGCCTCCACTGCTGACAGATGAGATGATTGCCCAATACACCTCTGCCCTGCTGGCTGGCACCATC
ACCTCTGGCTGGACCTTTGGAGCAGGACCAGCCCTCCAAATCCCATTTCCAATGCAGATGGCTTACAG
GTTCAATGGCATTGGAGTGACCCAGAATGTGCTCTATGAGAACCAGAAACTGATTGCCAACCAGTTCA
ACTCTGCCATTGGCAAGATTCAGGACTCCCTGTCCAGCACACCATCTGCCCTGGGCAAACTCCAAGAT
GTGGTGAACCAGAATGCCCAGGCTCTGAACACCCTGGTGAAGCAACTTTCCAGCAACTTTGGAGCCAT
CTCCTCTGTGCTGAATGACATCCTGAGCAGACTGGACCCACCAGAGGCTGAGGTCCAGATTGACAGAC
TGATTACAGGCAGACTCCAATCCCTCCAAACCTATGTGACCCAACAACTTATCAGGGCTGCTGAGATT
AGGGCATCTGCCAACCTGGCTGCCACCAAGATGAGTGAGTGTGTGCTGGGACAAAGCAAGAGGGTGGA
CTTCTGTGGCAAGGGCTACCACCTGATGAGTTTTCCACAGTCTGCCCCTCATGGAGTGGTGTTCCTGC
ATGTGACCTATGTGCCTGCCCATGAGAAGAACTTCACCACAGCCCCTGCCATCTGCCATGATGGCAAG
GCTCACTTTCCAAGGGAGGGAGTGTTTGTGAGCAATGGCACCCACTGGTTTGTGACCCAGAGGAACTT
CTATGAACCACAGATTATCACCACAGACAACACCTTTGTGTCTGGCAACTGTGATGTGGTGATTGGCA
TTGTGAACAACACAGTCTATGACCCACTCCAACCTGAACTGGACTCCTTCAAGGAGGAACTGGACAAA
TACTTCAAGAACCACACCAGCCCTGATGTGGACCTGGGAGACATCTCTGGCATCAATGCCTCTGTGGT
GAACATCCAGAAGGAGATTGACAGACTGAATGAGGTGGCTAAGAACCTGAATGAGTCCCTGATTGACC
TCCAAGAACTGGGCAAATATGAACAATACATCAAGTGGCCATGGTACATCTGGCTGGGCTTCATTGCT
GGACTGATTGCCATTGTGATGGTGACCATAATGCTGTGTTGTATGACCTCCTGTTGTTCCTGTCTGAA
AGGCTGTTGTTCCTGTGGCTCCTGTTGTAAGTTTGATGAGGATGACTCTGAACCTGTGCTGAAAGGAG
TGAAACTGCACTACACCTGACTCGAGCTGGTACTGCATGCACGCAATGCTAGCTGCCCCTTTCCCGTC
CTGGGTACCCCGAGTCTCCCCCGACCTCGGGTCCCAGGTATGCTCCCACCTCCACCTGCCCCACTCAC
CACCTCTGCTAGTTCCAGACACCTCCCAAGCACGCAGCAATGCAGCTCAAAACGCTTAGCCTAGCCAC
ACCCCCACGGGAAACAGCAGTGATTAACCTTTAGCAATAAACGAAAGTTTAACTAAGCTATACTAACC
CCAGGGTTGGTCAATTTCGTGCCAGCCACACCCTGGAGCTAGCaaaccgctgatcagcctcgactgtg
ccttctagttgccagccatctgttgtttgcccctcccccgtgccttccttgaccctggaaggtgccac
tcccactgtcctttcctaataaaatgaggaaattgcatcgcattgtctgagtaggtgtcattctattc
tggggggtggggggggcaggacagcaagggggaggattgggaagacaatagcaggcatgctggggat
gcggtgggctctatggcttctgaggcggaaagaaccagctggggctctagggggtatccccacgcgcc
ctgtagcggcgcattaagcgcggcgggtgtggtggttacgcgcagcgtgaccgctacacttgccagcg
ccctagcgcccgctcctttcgctttcttcccttcctttctcgccacgttcgccggctttccccgtcaa
gctctaaatcgggggctccctttagggttccgatttagtgctttacggcacctcgaccccaaaaaact
tgattagggtgatggttcacgtagtgggccatcgccctgatagacggtttttcgccctttgacgttgg
agtccacgttctttaatagtggactcttgttccaaactggaacaacactcaaccctatctcggtctat
tcttttgatttataagggattttgccgatttcggcctattggttaaaaaatgagctgatttaacaaaa
atttaacgcgaattaattctgtggaatgtgtgtcagttagggtgtggaaagtccccaggctccccagc
aggcagaagtatgcaaagcatgcatctcaattagtcagcaaccaggtgtggaaagtccccaggctccc
cagcaggcagaagtatgcaaagcatgcatctcaattagtcagcaaccatagtcccgcccctaactccg
cccatcccgcccctaactccgcccagttccgcccattctccgccccatggctgactaattttttttat
ttatgcagaggccgaggccgcctctgcctctgagctattccagaagtagtgaggaggcttttttggag
gcctaggcttttgcaaaaagctcccgggagcttgtatatccattttcggatctgatcaagagacagga
tgaggatcgtttcgcatgattgaacaagatggattgcacgcaggttctccggccgcttgggtggagag
gctattcggctatgactgggcacaacagacaatcggctgctctgatgccgccgtgttccggctgtcag
cgcaggggcgcccggttctttttgtcaagaccgacctgtccggtgccctgaatgaactgcaggacgag
gcagcgcggctatcgtggctggccacgacgggcgttccttgcgcagctgtgctcgacgttgtcactga
agcgggaagggactggctgctattgggcgaagtgccggggcaggatctcctgtcatctcaccttgctc
ctgccgagaaagtatccatcatggctgatgcaatgcggcggctgcatacgcttgatccggctacctgc
ccattcgaccaccaagcgaaacatcgcatcgagcgagcacgtactcggatggaagccggtcttgtcga
tcaggatgatctggacgaagagcatcaggggctcgcgccagccgaactgttcgccaggctcaaggcgc
gcatgcccgacggcgaggatctcgtcgtgacccatggcgatgcctgcttgccgaatatcatggtggaa
aatggccgcttttctggattcatcgactgtggccggctgggtgtggcggaccgctatcaggacatagc
gttggctacccgtgatattgctgaagagcttggcggcgaatgggctgaccgcttcctcgtgctttacg
gtatcgccgctcccgattcgcagcgcatcgccttctatcgccttcttgacgagttcttctgagcggga
ctctggggttcgaaatgaccgaccaagcgacgcccaacctgccatcacgagatttcgattccaccgcc
gccttctatgaaaggttgggcttcggaatcgttttccgggacgccggctggatgatcctccagcgcgg
ggatctcatgctggagttcttcgcccaccccaacttgtttattgcagcttataatggttacaaataaa
gcaatagcatcacaaatttcacaaataaagcatttttttcactgcattctagttgtggtttgtccaaa
ctcatcaatgtatcttatcatgtctgtataccgtcgacctctagctagagcttggcgtaatcatggtc
atagctgtttcctgtgtgaaattgttatccgctcacaattccacacaacatacgagccggaagcataa
agtgtaaagcctggggtgcctaatgagtgagctaactcacattaattgcgttgcgctcactgcccgct
ttccagtcgggaaacctgtcgtgccagctgcattaatgaatcggccaacgcgcggggagaggcggttt
gcgtattgggcgctcttccgcttcctcgctcactgactcgctgcgctcggtcgttcggctgcggcgag
cggtatcagctcactcaaaggcggtaatacggttatccacagaatcaggggataacgcaggaaagaac
atgtgagcaaaaggccagcaaaaggccaggaaccgtaaaaaggccgcgttgctggcgtttttccatag
gctccgcccccctgacgagcatcacaaaaatcgacgctcaagtcagaggtggcgaaacccgacaggac
tataaagataccaggcgtttccccctggaagctccctcgtgcgctctcctgttccgaccctgccgctt
accggatacctgtccgcctttctcccttcgggaagcgtggcgctttctcatagctcacgctgtaggta
tctcagttcggtgtaggtcgttcgctccaagctgggctgtgtgcacgaaccccccgttcagcccgacc
gctgcgccttatccggtaactatcgtcttgagtccaacccggtaagacacgacttatcgccactggca
gcagccactggtaacaggattagcagagcgaggtatgtaggcggtgctacagagttcttgaagtggtg
gcctaactacggctacactagaagaacagtatttggtatctgcgctctgctgaagccagttaccttcg
gaaaaagagttggtagctcttgatccggcaaacaaaccaccgctggtagcggtggtttttttgtttgc
aagcagcagattacgcgcagaaaaaaaggatctcaagaagatcctttgatcttttctacggggtctga
cgctcagtggaacgaaaactcacgttaagggattttggtcatgagattatcaaaaaggatcttcacct
agatccttttaaattaaaaatgaagttttaaatcaatctaaagtatatatgagtaaacttggtctgac
agttaccaatgcttaatcagtgaggcacctatctcagcgatctgtctatttcgttcatccatagttgc
ctgactccccgtcgtgtagataactacgatacgggagggcttaccatctggccccagtgctgcaatga
taccgcgagacccacgctcaccggctccagatttatcagcaataaaccagccagccggaagggccgag
cgcagaagtggtcctgcaactttatccgcctccatccagtctattaattgttgccgggaagctagagt
aagtagttcgccagttaatagtttgcgcaacgttgttgccattgctacaggcatcgtggtgtcacgct
cgtcgtttggtatggcttcattcagctccggttcccaacgatcaaggcgagttacatgatcccccatg
ttgtgcaaaaaagcggttagctccttcggtcctccgatcgttgtcagaagtaagttggccgcagtgtt
atcactcatggttatggcagcactgcataattctcttactgtcatgccatccgtaagatgcttttctg
tgactggtgagtactcaaccaagtcattctgagaatagtgtatgcggcgaccgagttgctcttgcccg
gcgtcaatacgggataataccgcgccacatagcagaactttaaaagtgctcatcattggaaaacgttc
ttcggggcgaaaactctcaaggatcttaccgctgttgagatccagttcgatgtaacccactcgtgcac
ccaactgatcttcagcatcttttactttcaccagcgtttctgggtgagcaaaaacaggaaggcaaaat
gccgcaaaaaagggaataagggcgacacggaaatgttgaatactcatactcttcctttttcaatatta
ttgaagcatttatcagggttattgtctcatgagcggatacatatttgaatgtatttagaaaaataaac
aaataggggttccgcgcacatttccccgaaaagtgccacctgacgtc
PVP30 pcDNA3.1 Indian B.1.617 Del-19
(SEQ ID NO: 64)
gacggatcgggagatctcccgatcccctatggtgcactctcagtacaatctgctctgatgccgcatag
ttaagccagtatctgctccctgcttgtgtgttggaggtcgctgagtagtgcgcgagcaaaatttaagc
tacaacaaggcaaggcttgaccgacaattgcatgaagaatctgcttagggttaggcgttttgcgctgc
ttcgcgatgtacgggccagatatacgcgttgacattgattattgactagttattaatagtaatcaatt
acggggtcattagttcatagcccatatatggagttccgcgttacataacttacggtaaatggcccgcc
tggctgaccgcccaacgacccccgcccattgacgtcaataatgacgtatgttcccatagtaacgccaa
tagggactttccattgacgtcaatgggtggagtatttacggtaaactgcccacttggcagtacatcaa
gtgtatcatatgccaagtacgccccctattgacgtcaatgacggtaaatggcccgcctggcattatgc
ccagtacatgaccttatgggactttcctacttggcagtacatctacgtattagtcatcgctattacca
tggtgatgcggttttggcagtacatcaatgggcgtggatagcggtttgactcacggggatttccaagt
ctccaccccattgacgtcaatgggagtttgttttggcaccaaaatcaacgggactttccaaaatgtcg
taacaactccgccccattgacgcaaatgggcggtaggcgtgtacggtgggaggtctatataagcagag
ctctctggctaactagagaacccactgcttactggcttatcgaaattaatacgactcactatagggag
acccaagctggctagccaccATGTTTGTGTTCCTGGTGCTGCTGCCACTGGTGTCCAGCCAGTGTGTG
AACCTGACCACCAGGACCCAACTTCCTCCTGCCTACACCAACTCCTTCACCAGGGGAGTCTACTACCC
TGACAAGGTGTTCAGGTCCTCTGTGCTGCACAGCACCCAGGACCTGTTCCTGCCATTCTTCAGCAATG
TGACCTGGTTCCATGCCATCCATGTGTCTGGCACCAATGGCACCAAGAGGTTTGACAACCCTGTGCTG
CCATTCAATGATGGAGTCTACTTTGCCAGCACAGAGAAGAGCAACATCATCAGGGGCTGGATTTTTGG
CACCACCCTGGACAGCAAGACCCAGTCCCTGCTGATTGTGAACAATGCCACCAATGTGGTGATTAAGG
TGTGTGAGTTCCAGTTCTGTAATGACCCATTCCTGGACGTCTACTACCACAAGAACAACAAGTCCTGG
ATGAAGTCTGAGTTCAGGGTCTACTCCTCTGCCAACAACTGTACCTTTGAATATGTGAGCCAACCATT
CCTGATGGACTTGGAGGGCAAGCAGGGCAACTTCAAGAACCTGAGGGAGTTTGTGTTCAAGAACATTG
ATGGCTACTTCAAGATTTACAGCAAACACACACCAATCAACCTGGTGAGGGACCTGCCACAGGGCTTC
TCTGCCTTGGAACCACTGGTGGACCTGCCAATTGGCATCAACATCACCAGGTTCCAGACCCTGCTGGC
TCTGCACAGGTCCTACCTGACACCTGGAGACTCCTCCTCTGGCTGGACAGCAGGAGCAGCAGCCTACT
ATGTGGGCTACCTCCAACCAAGGACCTTCCTGCTGAAATACAATGAGAATGGCACCATCACAGATGCT
GTGGACTGTGCCCTGGACCCACTGTCTGAGACCAAGTGTACCCTGAAATCCTTCACAGTGGAGAAGGG
CATCTACCAGACCAGCAACTTCAGGGTCCAACCAACAGAGAGCATTGTGAGGTTTCCAAACATCACCA
ACCTGTGTCCATTTGGAGAGGTGTTCAATGCCACCAGGTTTGCCTCTGTCTATGCCTGGAACAGGAAG
AGGATTAGCAACTGTGTGGCTGACTACTCTGTGCTCTACAACTCTGCCTCCTTCAGCACCTTCAAGTG
TTATGGAGTGAGCCCAACCAAACTGAATGACCTGTGTTTCACCAATGTCTATGCTGACTCCTTTGTGA
TTAGGGGAGATGAGGTGAGACAGATTGCCCCTGGACAAACAGGCAAGATTGCTGACTACAACTACAAA
CTGCCTGATGACTTCACAGGCTGTGTGATTGCCTGGAACAGCAACAACCTGGACAGCAAGGTGGGAGG
CAACTACAACTACAGGTACAGACTGTTCAGGAAGAGCAACCTGAAACCATTTGAGAGGGACATCAGCA
CAGAGATTTACCAGGCTGGCAGCACACCATGTAATGGAGTGCAGGGCTTCAACTGTTACTTTCCACTC
CAATCCTATGGCTTCCAACCAACCAATGGAGTGGGCTACCAACCATACAGGGTGGTGGTGCTGTCCTT
TGAACTGCTCCATGCCCCTGCCACAGTGTGTGGACCAAAGAAGAGCACCAACCTGGTGAAGAACAAGT
GTGTGAACTTCAACTTCAATGGACTGACAGGCACAGGAGTGCTGACAGAGAGCAACAAGAAGTTCCTG
CCATTCCAACAGTTTGGCAGGGACATTGCTGACACCACAGATGCTGTGAGGGACCCACAGACCTTGGA
GATTCTGGACATCACACCATGTTCCTTTGGAGGAGTGTCTGTGATTACACCTGGCACCAACACCAGCA
ACCAGGTGGCTGTGCTCTACCAGGGAGTGAACTGTACTGAGGTGCCTGTGGCTATCCATGCTGACCAA
CTTACACCAACCTGGAGGGTCTACAGCACAGGCAGCAATGTGTTCCAGACCAGGGCTGGCTGTCTGAT
TGGAGCAGAGCATGTGAACAACTCCTATGAGTGTGACATCCCAATTGGAGCAGGCATCTGTGCCTCCT
ACCAGACCCAGACCAACAGCAGGAGGAGGGCAAGGTCTGTGGCAAGCCAGAGCATCATTGCCTACACA
ATGAGTCTGGGAGCAGAGAACTCTGTGGCTTACAGCAACAACAGCATTGCCATCCCAACCAACTTCAC
CATCTCTGTGACCACAGAGATTCTGCCTGTGAGTATGACCAAGACCTCTGTGGACTGTACAATGTATA
TCTGTGGAGACAGCACAGAGTGTAGCAACCTGCTGCTCCAATATGGCTCCTTCTGTACCCAACTTAAC
AGGGCTCTGACAGGCATTGCTGTGGAACAGGACAAGAACACCCAGGAGGTGTTTGCCCAGGTGAAGCA
GATTTACAAGACACCTCCAATCAAGGACTTTGGAGGCTTCAACTTCAGCCAGATTCTGCCTGACCCAA
GCAAGCCAAGCAAGAGGTCCTTCATTGAGGACCTGCTGTTCAACAAGGTGACCCTGGCTGATGCTGGC
TTCATCAAGCAATATGGAGACTGTCTGGGAGACATTGCTGCCAGGGACCTGATTTGTGCCCAGAAGTT
CAATGGACTGACAGTGCTGCCTCCACTGCTGACAGATGAGATGATTGCCCAATACACCTCTGCCCTGC
TGGCTGGCACCATCACCTCTGGCTGGACCTTTGGAGCAGGAGCAGCCCTCCAAATCCCATTTGCTATG
CAGATGGCTTACAGGTTCAATGGCATTGGAGTGACCCAGAATGTGCTCTATGAGAACCAGAAACTGAT
TGCCAACCAGTTCAACTCTGCCATTGGCAAGATTCAGGACTCCCTGTCCAGCACAGCCTCTGCCCTGG
GCAAACTCCAAGATGTGGTGAACCAGAATGCCCAGGCTCTGAACACCCTGGTGAAGCAACTTTCCAGC
AACTTTGGAGCCATCTCCTCTGTGCTGAATGACATCCTGAGCAGACTGGACAAGGTGGAGGCTGAGGT
CCAGATTGACAGACTGATTACAGGCAGACTCCAATCCCTCCAAACCTATGTGACCCAACAACTTATCA
GGGCTGCTGAGATTAGGGCATCTGCCAACCTGGCTGCCACCAAGATGAGTGAGTGTGTGCTGGGACAA
AGCAAGAGGGTGGACTTCTGTGGCAAGGGCTACCACCTGATGAGTTTTCCACAGTCTGCCCCTCATGG
AGTGGTGTTCCTGCATGTGACCTATGTGCCTGCCCATGAGAAGAACTTCACCACAGCCCCTGCCATCT
GCCATGATGGCAAGGCTCACTTTCCAAGGGAGGGAGTGTTTGTGAGCAATGGCACCCACTGGTTTGTG
ACCCAGAGGAACTTCTATGAACCACAGATTATCACCACAGACAACACCTTTGTGTCTGGCAACTGTGA
TGTGGTGATTGGCATTGTGAACAACACAGTCTATGACCCACTCCAACCTGAACTGGACTCCTTCAAGG
AGGAACTGGACAAATACTTCAAGAACCACACCAGCCCTGATGTGGACCTGGGAGACATCTCTGGCATC
AATGCCTCTGTGGTGAACATCCAGAAGGAGATTGACAGACTGAATGAGGTGGCTAAGAACCTGAATGA
GTCCCTGATTGACCTCCAAGAACTGGGCAAATATGAACAATACATCAAGTGGCCATGGTACATCTGGC
TGGGCTTCATTGCTGGACTGATTGCCATTGTGATGGTGACCATAATGCTGTGTTGTATGACCTCCTGT
TGTTCCTGTCTGAAAGGCTGTTGTTCCTGTGGCTCCTGTTGTTGAggatccgagctcggtaccaagct
taagtttaaaccgctgatcagcctcgactgtgccttctagttgccagccatctgttgtttgcccctcc
cccgtgccttccttgaccctggaaggtgccactcccactgtcctttcctaataaaatgaggaaattgc
atcgcattgtctgagtaggtgtcattctattctggggggtggggggggcaggacagcaagggggagg
attgggaagacaatagcaggcatgctggggatgcggtgggctctatggcttctgaggcggaaagaacc
agctggggctctagggggtatccccacgcgccctgtagcggcgcattaagcgcggcgggtgtggtggt
tacgcgcagcgtgaccgctacacttgccagcgccctagcgcccgctcctttcgctttcttcccttcct
ttctcgccacgttcgccggctttccccgtcaagctctaaatcgggggctccctttagggttccgattt
agtgctttacggcacctcgaccccaaaaaacttgattagggtgatggttcacgtagtgggccatcgcc
ctgatagacggtttttcgccctttgacgttggagtccacgttctttaatagtggactcttgttccaaa
ctggaacaacactcaaccctatctcggtctattcttttgatttataagggattttgccgatttcggcc
tattggttaaaaaatgagctgatttaacaaaaatttaacgcgaattaattctgtggaatgtgtgtcag
ttagggtgtggaaagtccccaggctccccagcaggcagaagtatgcaaagcatgcatctcaattagtc
agcaaccaggtgtggaaagtccccaggctccccagcaggcagaagtatgcaaagcatgcatctcaatt
agtcagcaaccatagtcccgcccctaactccgcccatcccgcccctaactccgcccagttccgcccat
tctccgccccatggctgactaattttttttatttatgcagaggccgaggccgcctctgcctctgagct
attccagaagtagtgaggaggcttttttggaggcctaggcttttgcaaaaagctcccgggagcttgta
tatccattttcggatctgatcaagagacaggatgaggatcgtttcgcatgattgaacaagatggattg
cacgcaggttctccggccgcttgggtggagaggctattcggctatgactgggcacaacagacaatcgg
ctgctctgatgccgccgtgttccggctgtcagcgcaggggcgcccggttctttttgtcaagaccgacc
tgtccggtgccctgaatgaactgcaggacgaggcagcgcggctatcgtggctggccacgacgggcgtt
ccttgcgcagctgtgctcgacgttgtcactgaagcgggaagggactggctgctattgggcgaagtgcc
ggggcaggatctcctgtcatctcaccttgctcctgccgagaaagtatccatcatggctgatgcaatgc
ggcggctgcatacgcttgatccggctacctgcccattcgaccaccaagcgaaacatcgcatcgagcga
gcacgtactcggatggaagccggtcttgtcgatcaggatgatctggacgaagagcatcaggggctcgc
gccagccgaactgttcgccaggctcaaggcgcgcatgcccgacggcgaggatctcgtcgtgacccatg
gcgatgcctgcttgccgaatatcatggtggaaaatggccgcttttctggattcatcgactgtggccgg
ctgggtgtggcggaccgctatcaggacatagcgttggctacccgtgatattgctgaagagcttggcgg
cgaatgggctgaccgcttcctcgtgctttacggtatcgccgctcccgattcgcagcgcatcgccttct
atcgccttcttgacgagttcttctgagcgggactctggggttcgaaatgaccgaccaagcgacgccca
acctgccatcacgagatttcgattccaccgccgccttctatgaaaggttgggcttcggaatcgttttc
cgggacgccggctggatgatcctccagcgcggggatctcatgctggagttcttcgcccaccccaactt
gtttattgcagcttataatggttacaaataaagcaatagcatcacaaatttcacaaataaagcatttt
tttcactgcattctagttgtggtttgtccaaactcatcaatgtatcttatcatgtctgtataccgtcg
acctctagctagagcttggcgtaatcatggtcatagctgtttcctgtgtgaaattgttatccgctcac
aattccacacaacatacgagccggaagcataaagtgtaaagcctggggtgcctaatgagtgagctaac
tcacattaattgcgttgcgctcactgcccgctttccagtcgggaaacctgtcgtgccagctgcattaa
tgaatcggccaacgcgcggggagaggcggtttgcgtattgggcgctcttccgcttcctcgctcactga
ctcgctgcgctcggtcgttcggctgcggcgagcggtatcagctcactcaaaggcggtaatacggttat
ccacagaatcaggggataacgcaggaaagaacatgtgagcaaaaggccagcaaaaggccaggaaccgt
aaaaaggccgcgttgctggcgtttttccataggctccgcccccctgacgagcatcacaaaaatcgacg
ctcaagtcagaggtggcgaaacccgacaggactataaagataccaggcgtttccccctggaagctccc
tcgtgcgctctcctgttccgaccctgccgcttaccggatacctgtccgcctttctcccttcgggaagc
gtggcgctttctcatagctcacgctgtaggtatctcagttcggtgtaggtcgttcgctccaagctggg
ctgtgtgcacgaaccccccgttcagcccgaccgctgcgccttatccggtaactatcgtcttgagtcca
acccggtaagacacgacttatcgccactggcagcagccactggtaacaggattagcagagcgaggtat
gtaggcggtgctacagagttcttgaagtggtggcctaactacggctacactagaagaacagtatttgg
tatctgcgctctgctgaagccagttaccttcggaaaaagagttggtagctcttgatccggcaaacaaa
ccaccgctggtagcggtggtttttttgtttgcaagcagcagattacgcgcagaaaaaaaggatctcaa
gaagatcctttgatcttttctacggggtctgacgctcagtggaacgaaaactcacgttaagggatttt
ggtcatgagattatcaaaaaggatcttcacctagatccttttaaattaaaaatgaagttttaaatcaa
tctaaagtatatatgagtaaacttggtctgacagttaccaatgcttaatcagtgaggcacctatctca
gcgatctgtctatttcgttcatccatagttgcctgactccccgtcgtgtagataactacgatacggga
gggcttaccatctggccccagtgctgcaatgataccgcgagacccacgctcaccggctccagatttat
cagcaataaaccagccagccggaagggccgagcgcagaagtggtcctgcaactttatccgcctccatc
cagtctattaattgttgccgggaagctagagtaagtagttcgccagttaatagtttgcgcaacgttgt
tgccattgctacaggcatcgtggtgtcacgctcgtcgtttggtatggcttcattcagctccggttccc
aacgatcaaggcgagttacatgatcccccatgttgtgcaaaaaagcggttagctccttcggtcctccg
atcgttgtcagaagtaagttggccgcagtgttatcactcatggttatggcagcactgcataattctct
tactgtcatgccatccgtaagatgcttttctgtgactggtgagtactcaaccaagtcattctgagaat
agtgtatgcggcgaccgagttgctcttgcccggcgtcaatacgggataataccgcgccacatagcaga
actttaaaagtgctcatcattggaaaacgttcttcggggcgaaaactctcaaggatcttaccgctgtt
gagatccagttcgatgtaacccactcgtgcacccaactgatcttcagcatcttttactttcaccagcg
tttctgggtgagcaaaaacaggaaggcaaaatgccgcaaaaaagggaataagggcgacacggaaatgt
tgaatactcatactcttcctttttcaatattattgaagcatttatcagggttattgtctcatgagcgg
atacatatttgaatgtatttagaaaaataaacaaataggggttccgcgcacatttccccgaaaagtgc
cacctgacgtc
SA Hexapro Spike (pVP22b)
(SEQ ID NO: 65)
MFVFLVLLPLVSSQCVNFTTRTQLPPAYTNSFTRGVYYPDKVFRSSVLHSTQDLFLPFFSNVTWFHAI
HVSGTNGTKRFANPVLPFNDGVYFASTEKSNIIRGWIFGTTLDSKTQSLLIVNNATNVVIKVCEFQFC
NDPFLGVYYHKNNKSWMESEFRVYSSANNCTFEYVSQPFLMDLEGKQGNFKNLREFVFKNIDGYFKIY
SKHTPINLVRGLPQGFSALEPLVDLPIGINITRFQTLLALHISYLTPGDSSSGWTAGAAAYYVGYLQP
RTFLLKYNENGTITDAVDCALDPLSETKCTLKSFTVEKGIYQTSNFRVQPTESIVRFPNITNLCPFGE
VFNATRFASVYAWNRKRISNCVADYSVLYNSASFSTFKCYGVSPTKLNDLCFTNVYADSFVIRGDEVR
QIAPGQTGNIADYNYKLPDDFTGCVIAWNSNNLDSKVGGNYNYLYRLFRKSNLKPFERDISTEIYQAG
STPCNGVKGFNCYFPLQSYGFQPTYGVGYQPYRVVVLSFELLHAPATVCGPKKSTNLVKNKCVNFNFN
GLTGTGVLTESNKKFLPFQQFGRDIADTTDAVRDPQTLEILDITPCSFGGVSVITPGTNTSNQVAVLY
QDVNCTEVPVAIHADQLTPTWRVYSTGSNVFQTRAGCLIGAEHVNNSYECDIPIGAGICASYQTQTNS
PGSASSVASQSIIAYTMSLGVENSVAYSNNSIAIPTNFTISVTTEILPVSMTKTSVDCTMYICGDSTE
CSNLLLQYGSFCTQLNRALTGIAVEQDKNTQEVFAQVKQIYKTPPIKDFGGFNFSQILPDPSKPSKRS
PIEDLLFNKVTLADAGFIKQYGDCLGDIAARDLICAQKFNGLTVLPPLLTDEMIAQYTSALLAGTITS
GWTFGAGPALQIPFPMQMAYRFNGIGVTQNVLYENQKLIANQFNSAIGKIQDSLSSTPSALGKLQDVV
NQNAQALNTLVKQLSSNFGAISSVLNDILSRLDPPEAEVQIDRLITGRLQSLQTYVTQQLIRAAEIRA
SANLAATKMSECVLGQSKRVDFCGKGYHLMSFPQSAPHGVVFLHVTYVPAQEKNFTTAPAICHDGKAH
FPREGVFVSNGTHWFVTQRNFYEPQIITTDNTFVSGNCDVVIGIVNNTVYDPLQPELDSFKEELDKYF
KNHTSPDVDLGDISGINASVVNIQKEIDRLNEVAKNLNESLIDLQELGKYEQYIKWPWYIWLGFIAGL
IAIVMVTIMLCCMTSCCSCLKGCCSCGSCCKFDEDDSEPVLKGVKLHYT*
Indian B.1.617 Spike (pVP28)
(SEQ ID NO: 66)
MFVFLVLLPLVSSQCVNLTTRTQLPPAYTNSFTRGVYYPDKVFRSSVLHSTQDLFLPFFSNVTWFHAI
HVSGTNGTKRFDNPVLPFNDGVYFASTEKSNIIRGWIFGTTLDSKTQSLLIVNNATNVVIKVCEFQFC
NDPFLDVYYHKNNKSWMKSEFRVYSSANNCTFEYVSQPFLMDLEGKQGNFKNLREFVFKNIDGYFKIY
SKHTPINLVRDLPQGFSALEPLVDLPIGINITRFQTLLALHRSYLTPGDSSSGWTAGAAAYYVGYLQP
RTFLLKYNENGTITDAVDCALDPLSETKCTLKSFTVEKGIYQTSNERVQPTESIVRFPNITNLCPFGE
VFNATRFASVYAWNRKRISNCVADYSVLYNSASFSTFKCYGVSPTKLNDLCFTNVYADSFVIRGDEVR
QIAPGQTGKIADYNYKLPDDFTGCVIAWNSNNLDSKVGGNYNYRYRLFRKSNLKPFERDISTEIYQAG
STPCNGVQGFNCYFPLQSYGFQPTNGVGYQPYRVVVLSFELLHAPATVCGPKKSTNLVKNKCVNFNFN
GLTGTGVLTESNKKFLPFQQFGRDIADTTDAVRDPQTLEILDITPCSFGGVSVITPGTNTSNQVAVLY
QGVNCTEVPVAIHADQLTPTWRVYSTGSNVFQTRAGCLIGAEHVNNSYECDIPIGAGICASYQTQTNS
RRRARSVASQSIIAYTMSLGAENSVAYSNNSIAIPTNFTISVTTEILPVSMTKTSVDCTMYICGDSTE
CSNLLLQYGSFCTQLNRALTGIAVEQDKNTQEVFAQVKQIYKTPPIKDFGGFNFSQILPDPSKPSKRS
FIEDLLFNKVTLADAGFIKQYGDCLGDIAARDLICAQKFNGLTVLPPLLTDEMIAQYTSALLAGTITS
GWTFGAGAALQIPFAMQMAYRFNGIGVTQNVLYENQKLIANQFNSAIGKIQDSLSSTASALGKLQDVV
NQNAQALNTLVKQLSSNFGAISSVLNDILSRLDKVEAEVQIDRLITGRLQSLQTYVTQQLIRAAEIRA
SANLAATKMSECVLGQSKRVDFCGKGYHLMSFPQSAPHGVVFLHVTYVPAHEKNFTTAPAICHDGKAH
FPREGVFVSNGTHWFVTQRNFYEPQIITTDNTFVSGNCDVVIGIVNNTVYDPLQPELDSFKEELDKYF
KNHTSPDVDLGDISGINASVVNIQKEIDRLNEVAKNLNESLIDLQELGKYEQYIKWPWYIWLGFIAGL
IAIVMVTIMLCCMTSCCSCLKGCCSCGSCCKFDEDDSEPVLKGVKLHYT*
Indian B.1.617 Spike Hexapro (pVP29b)
(SEQ ID NO: 67)
MFVFLVLLPLVSSQCVNLTTRTQLPPAYTNSFTRGVYYPDKVFRSSVLHSTQDLFLPFFSNVTWFHAI
HVSGTNGTKRFDNPVLPFNDGVYFASTEKSNIIRGWIFGTTLDSKTQSLLIVNNATNVVIKVCEFQFC
NDPFLDVYYHKNNKSWMKSEFRVYSSANNCTFEYVSQPFLMDLEGKQGNFKNLREFVFKNIDGYFKIY
SKHTPINLVRDLPQGFSALEPLVDLPIGINITRFQTLLALHRSYLTPGDSSSGWTAGAAAYYVGYLQP
RTFLLKYNENGTITDAVDCALDPLSETKCTLKSFTVEKGIYQTSNFRVQPTESIVRFPNITNLCPFGE
VFNATRFASVYAWNRKRISNCVADYSVLYNSASFSTFKCYGVSPTKLNDLCFTNVYADSFVIRGDEVR
QIAPGQTGKIADYNYKLPDDFTGCVIAWNSNNLDSKVGGNYNYRYRLFRKSNLKPFERDISTEIYQAG
STPCNGVQGFNCYFPLQSYGFQPTNGVGYQPYRVVVLSFELLHAPATVCGPKKSTNLVKNKCVNFNFN
GLTGTGVLTESNKKFLPFQQFGRDIADTTDAVRDPQTLEILDITPCSFGGVSVITPGTNTSNQVAVLY
QGVNCTEVPVAIHADQLTPTWRVYSTGSNVFQTRAGCLIGAEHVNNSYECDIPIGAGICASYQTQTNS
RGSASSVASQSIIAYTMSLGAENSVAYSNNSIAIPTNFTISVTTEILPVSMTKTSVDCTMYICGDSTE
CSNLLLQYGSFCTQLNRALTGIAVEQDKNTQEVFAQVKQIYKTPPIKDFGGFNFSQILPDPSKPSKRS
PIEDLLENKVTLADAGFIKQYGDCLGDIAARDLICAQKFNGLTVLPPLLTDEMIAQYTSALLAGTITS
GWTFGAGPALQIPFPMQMAYRFNGIGVTQNVLYENQKLIANQFNSAIGKIQDSLSSTPSALGKLQDVV
NQNAQALNTLVKQLSSNFGAISSVLNDILSRLDPPEAEVQIDRLITGRLQSLQTYVTQQLIRAAEIRA
SANLAATKMSECVLGQSKRVDFCGKGYHLMSFPQSAPHGVVFLHVTYVPAHEKNFTTAPAICHDGKAH
FPREGVFVSNGTHWFVTQRNFYEPQIITTDNTFVSGNCDVVIGIVNNTVYDPLQPELDSFKEELDKYF
KNHTSPDVDLGDISGINASVVNIQKEIDRLNEVAKNLNESLIDLQELGKYEQYIKWPWYIWLGFIAGL
IAIVMVTIMLCCMTSCCSCLKGCCSCGSCCKFDEDDSEPVLKGVKLHYT*
Indian B.1.617 Spike Del-19 (pVP30)
(SEQ ID NO: 68)
MFVFLVLLPLVSSQCVNLTTRTQLPPAYTNSFTRGVYYPDKVFRSSVLHSTQDLFLPFFSNVTWFHAI
HVSGTNGTKRFDNPVLPENDGVYFASTEKSNIIRGWIFGTTLDSKTQSLLIVNNATNVVIKVCEFQFC
NDPFLDVYYHKNNKSWMKSEFRVYSSANNCTFEYVSQPFLMDLEGKQGNFKNLREFVFKNIDGYFKIY
SKHTPINLVRDLPQGFSALEPLVDLPIGINITRFQTLLALHRSYLTPGDSSSGWTAGAAAYYVGYLQP
RTFLLKYNENGTITDAVDCALDPLSETKCTLKSFTVEKGIYQTSNFRVQPTESIVRFPNITNLCPFGE
VFNATRFASVYAWNRKRISNCVADYSVLYNSASFSTFKCYGVSPTKLNDLCFTNVYADSFVIRGDEVR
QIAPGQTGKIADYNYKLPDDFTGCVIAWNSNNLDSKVGGNYNYRYRLFRKSNLKPFERDISTEIYQAG
STPCNGVQGFNCYFPLQSYGFQPTNGVGYQPYRVVVLSFELLHAPATVCGPKKSTNLVKNKCVNFNFN
GLTGTGVLTESNKKFLPFQQFGRDIADTTDAVRDPQTLEILDITPCSFGGVSVITPGTNTSNQVAVLY
QGVNCTEVPVAIHADQLTPTWRVYSTGSNVFQTRAGCLIGAEHVNNSYECDIPIGAGICASYQTQTNS
RRRARSVASQSIIAYTMSLGAENSVAYSNNSIAIPTNFTISVTTEILPVSMTKTSVDCTMYICGDSTE
CSNLLLQYGSFCTQLNRALTGIAVEQDKNTQEVFAQVKQIYKTPPIKDFGGFNFSQILPDPSKPSKRS
FIEDLLFNKVTLADAGFIKQYGDCLGDIAARDLICAQKFNGLTVLPPLLTDEMIAQYTSALLAGTITS
GWTFGAGAALQIPFAMQMAYRFNGIGVTQNVLYENQKLIANQFNSAIGKIQDSLSSTASALGKLQDVV
NQNAQALNTLVKQLSSNFGAISSVLNDILSRLDKVEAEVQIDRLITGRLQSLQTYVTQQLIRAAEIRA
SANLAATKMSECVLGQSKRVDFCGKGYHLMSFPQSAPHGVVFLHVTYVPAHEKNFTTAPAICHDGKAH
FPREGVFVSNGTHWFVTQRNFYEPQIITTDNTFVSGNCDVVIGIVNNTVYDPLQPELDSFKEELDKYF
KNHTSPDVDLGDISGINASVVNIQKEIDRLNEVAKNLNESLIDLQELGKYEQYIKWPWYIWLGFIAGL
IAIVMVTIMLCCMTSCCSCLKGCCSCGSCC*
SARS-COV-2 Spike Hexapro (pVP31b)
(SEQ ID NO: 69)
MFVFLVLLPLVSSQCVNLTTRTQLPPAYTNSFTRGVYYPDKVERSSVLHSTQDLFLPFFSNVTWFHAI
HVSGTNGTKRFDNPVLPFNDGVYFASTEKSNIIRGWIFGTTLDSKTQSLLIVNNATNVVIKVCEFQFC
NDPFLGVYYHKNNKSWMESEFRVYSSANNCTFEYVSQPFLMDLEGKQGNFKNLREFVFKNIDGYFKIY
SKHTPINLVRDLPQGFSALEPLVDLPIGINITRFQTLLALHRSYLTPGDSSSGWTAGAAAYYVGYLQP
RTFLLKYNENGTITDAVDCALDPLSETKCTLKSFTVEKGIYQTSNFRVQPTESIVRFPNITNLCPFGE
VFNATRFASVYAWNRKRISNCVADYSVLYNSASFSTFKCYGVSPTKLNDLCFTNVYADSFVIRGDEVR
QIAPGQTGKIADYNYKLPDDFTGCVIAWNSNNLDSKVGGNYNYLYRLFRKSNLKPFERDISTEIYQAG
STPCNGVEGFNCYFPLQSYGFQPTNGVGYQPYRVVVLSFELLHAPATVCGPKKSTNLVKNKCVNFNFN
GLTGTGVLTESNKKFLPFQQFGRDIADTTDAVRDPQTLEILDITPCSFGGVSVITPGTNTSNQVAVLY
QDVNCTEVPVAIHADQLTPTWRVYSTGSNVFQTRAGCLIGAEHVNNSYECDIPIGAGICASYQTQTNS
PGSASSVASQSIIAYTMSLGAENSVAYSNNSIAIPTNFTISVTTEILPVSMTKTSVDCTMYICGDSTE
CSNLLLQYGSFCTQLNRALTGIAVEQDKNTQEVFAQVKQIYKTPPIKDFGGFNFSQILPDPSKPSKRS
PIEDLLFNKVTLADAGFIKQYGDCLGDIAARDLICAQKFNGLTVLPPLLTDEMIAQYTSALLAGTITS
GWTFGAGPALQIPFPMQMAYRFNGIGVTQNVLYENQKLIANQFNSAIGKIQDSLSSTPSALGKLQDVV
NQNAQALNTLVKQLSSNFGAISSVLNDILSRLDPPEAEVQIDRLITGRLQSLQTYVTQQLIRAAEIRA
SANLAATKMSECVLGQSKRVDFCGKGYHLMSFPQSAPHGVVFLHVTYVPAQEKNFTTAPAICHDGKAH
FPREGVFVSNGTHWFVTQRNFYEPQIITTDNTFVSGNCDVVIGIVNNTVYDPLQPELDSFKEELDKYF
KNHTSPDVDLGDISGINASVVNIQKEIDRLNEVAKNLNESLIDLQELGKYEQYIKWPWYIWLGFIAGL
IAIVMVTIMLCCMTSCCSCLKGCCSCGSCCKFDEDDSEPVLKGVKLHYT*

### Example 5: Development of an Omicron-Specific mRNA Vaccination Against SARS-CoV-2

### Materials and Methods:

[0335] Molecular cloning. The Omicron spike amino acid sequence was derived from two lineage BA.1 Omicron cases identified in Canada on Nov. 23, 2021 (GISAID EpiCoV, EPI_ISL_6826713 and EPI_ISL_6826714). Omicron spike cDNA were codon optimized, synthesized as gblocks (IDT) and cloned to mRNA vector with 5′, 3′ untranslated region (UTR) and poly A tail. The furin cleave site (RRAR) was replaced with a GSAS short stretch in the mRNA vector. HexaPro mutations were introduced in the WT sequence (Wuhan-Hu-1, which was used for the current clinical mRNA vaccines) and Omicron variant spike sequence of mRNA vector to improve expression and prefusion state. The accessory plasmids for pseudovirus assay including pHIVNLGagPol and pCCNanoLuc2AEGFP were from Dr. Bieniasz′ lab. The C-terminal 19 amino acids were deleted in the SARS-CoV-2 spike sequence for the pseudovirus assay. A list of oligos has been provided in table 2.

TABLE 2
List of oligos

| SEQ | | |
|---|---|---|
| ID | | |
| NO: | Name | Sequence |
| 23 | 46_gb0 | Gtgggaggtctatataagcagagctctctggctaac |
| | | tagagaacccactgcttactggcttatcgaaattaa |
| | | tacgactcactatagggagacccaagctggctagcc |
| | | accGAGAATAAACTAGTATTCTTCTGGTCCCCACAG |
| | | ACTCAGAGAGAACCCGCCACCATgTTTGTGTTCCTG |
| | | GTGCTGCTGCCACTGGTGTCCAGCCAGTGTGTGAAC |
| | | CTGACCACCAGGACCCAACTTCCTCCTGCCTACACC |
| | | AACTCCTTCACCAGGGGAGTCTACTACCCTGACAAG |
| | | GTGTTCAGGTCCTCTGTGCTGCACAGCACCCAGGAC |
| | | CTGTTCCTGCCATTCTTCAGCAATGTGACCTGGTTC |
| | | CATGTGATCTCTGGCACCAATGGCACCAAGAGGTTT |
| | | GACAACCCTGTGCTGCCATTCAATGATGGAGTCTAC |
| | | TTTGCCAGCAtcGAGAAGAGCAACATCATCAGGGGC |
| | | TGGATTTTTGGCACCACCCTGGACAGCAAGACCCAG |
| | | TCCCTGCTGATTGTGAACAATGCCACCAATGTGGTG |
| | | ATTAAGGTGTGTGAGTTCCAGTTCTGTAATGACCCA |
| | | TTCCTGGacCACAAGAACAACAAGTCCTGGATGG |
| 24 | 46_gb1 | CACAAGAACAACAAGTCCTGGATGGAGTCTGAGTTC |
| | | AGGGTCTACTCCTCTGCCAACAACTGTACCTTTGAA |
| | | TATGTGAGCCAACCATTCCTGATGGACTTGGAGGGC |
| | | AAGCAGGGCAACTTCAAGAACCTGAGGGAGTTTGTG |
| | | TTCAAGAACATTGATGGCTACTTCAAGATTTACAGC |
| | | AAACACACACCAATCatcGTGAGGGAGCCCGAGGAC |
| | | CTGCCACAGGGCTTCTCTGCCTTGGAACCACTGGTG |
| | | GACCTGCCAATTGGCATCAACATCACCAGGTTCCAG |
| | | ACCCTGCTGGCTCTGCACAGGTCCTACCTGACACCT |
| | | GGAGACTCCTCCTCTGGCTGGACAGCAGGAGCAGCA |
| | | GCCTACTATGTGGGCTACCTCCAACCAAGGACCTTC |
| | | CTGCTGAAATACAATGAGAATGGCACCATCACAGAT |
| | | GCTGTGGACTGTGCCCTGGACCCACTGTCTGAGACC |
| | | AAGTGTACCCTGAAATCCTTCACAGTGGAGAAGGGC |
| | | ATCTACCAGACCAGCAACTTCAGGGTCCAACCAACA |
| | | AGGAGCATTGTGAGGTTTCCAAACATCACCAACCTG |
| | | TGTCCATTTGacGAGGTGTTCAAcGCCACCAGGTTT |
| | | GCCTCTGTCTATGCCTGGAACAGG |
| 25 | 46_gb2 | GCCTCTGTCTATGCCTGGAACAGGAAGAGGATTAGC |
| | | AACTGTGTGGCTGACTACTCTGTGCTCTACAACctg |
| | | GCCcCCTTCttCACCTTCAAGTGTTATGGAGTGAGC |
| | | CCAACCAAACTGAATGACCTGTGTTTCACCAATGTC |
| | | TATGCTGACTCCTTTGTGATTAGGGGAGATGAGGTG |
| | | AGACAGATTGCCCCTGGACAAACAGGCAACATTGCT |
| | | GACTACAACTACAAACTGCCTGATGACTTCACAGGC |
| | | TGTGTGATTGCCTGGAACAGCAACAAgCTGGACAGC |
| | | AAGGTGagcGGCAACTACAACTACCTCTACAGACTG |
| | | TTCAGGAAGAGCAACCTGAAACCATTTGAGAGGGAC |
| | | ATCAGCACAGAGATTTACCAGGCTGGCAaCAagCCA |
| | | TGTAATGGAGTGGCCGGCTTCAACTGTTACTTTCCA |
| | | CTCCggTCCTATaGCTTCCggCCAACCtacGGAGTG |
| | | GGCcACCAACCATACAGGGTGGTGGTGCTGTCCTTT |
| | | GAACTGCTCCATGCCCCTGCCACAGTGTGTGGACCA |
| | | AAGAAGAGCACCAACCTGGTGAAGAACAAGTGTGTG |
| | | AACTTCAACTTCAATGGACTGAagGGCACAGGAGTG |
| | | CTGACAGAGAGCAACAAGAAGTTCCTGCCATTCCAA |
| | | CAGTTTGGCAGGGACATTGCTGACACCACAGATGCT |
| | | GTGAGGGACCCACAGACCTTGGAGATTCTGGACATC |
| | | ACACCATGTTCCTTTGGAGGAGTGTCTGTGATTACA |
| | | CCTGGCACCAACACCAGCAACCAGGTGGCTGTGCTC |
| | | TACCAGGgCGTGAACTGTACTGAGGTGCCTGTGGCT |
| | | ATCCATGCTGACCAACTTACACCAACCTGGAGGGTC |
| | | TACAGCACAGGCAGCAATGTGTTCCAGACCAGGGCT |
| | | GGCTGTCTGATTGGAGCAGAGtacGTGAACAACTCC |
| | | TATGAGTGTGACATCCCAATTGGAGCAGGCATCTG |
| 26 | 46_gb3 | CCCAATTGGAGCAGGCATCTGTGCCTCCTACCAGAC |
| | | CCAGACCAAgAGCCacGGCTCTGCATCTTCTGTGGC |
| | | AAGCCAGAGCATCATTGCCTACACAATGAGTCTGGG |
| | | AGCAGAGAACTCTGTGGCTTACAGCAACAACAGCAT |
| | | TGCCATCCCAACCAACTTCACCATCTCTGTGACCAC |
| | | AGAGATTCTGCCTGTGAGTATGACCAAGACCTCTGT |
| | | GGACTGTACAATGTATATCTGTGGAGACAGCACAGA |
| | | GTGTAGCAACCTGCTGCTCCAATATGGCTCCTTCTG |
| | | TACCCAACTTAAgAGGGCTCTGACAGGCATTGCTGT |
| | | GGAACAGGACAAGAACACCCAGGAGGTGTTTGCCCA |
| | | GGTGAAGCAGATTTACAAGACACCTCCAATCAAGtA |
| | | CTTTGGAGGCTTCAACTTCAGCCAGATTCTGCCTGA |
| | | CCCAAGCAAGCCAAGCAAGAGGTCCCCTATTGAGGA |
| | | CCTGCTGTTCAACAAGGTGACCCTGGCTGATGCTGG |
| | | CTTCATCAAGCAATATGGAGACTGTCTGGGAGACAT |
| | | TGCTGCCAGGGACCTGATTTGTGCCCAGAAGTTCAA |
| | | gGGACTGACAGTGCTGCCTCCACTGCTGACAGATGA |
| | | GATGATTGCCCAATACACCTCTGCCCTGCTGGCTGG |
| | | CACCATCACCTCTGGCTGGACCTTTGGAGCAGGACC |
| | | AGCCCTCCAAATCCCATTTCCAATGCAGATGGCTTA |
| | | CAGGTTCAATGGCATTGGAGTGACCCAGAATGTGCT |
| | | CTATGAGAACCAGAAACTGATTGCCAACCAGTTCAA |
| | | CTCTGCCATTGGCAAGATTCAGGACTCCCTGTCCAG |
| | | CACACCATCTGCCCTGGGCAAACTCCAAGATGTGGT |
| | | GAACCAcAATGCCCAGGCTCTGAACACCCTGGTGAA |
| | | GCAACTTTCCAGCAAgTTTGGAGCCATCTCCTCTGT |
| | | GCTGAATGACATCttcAGCAGACTGGACCCACCAGA |
| | | GGCTGAGGTCCAGATTGACAGACTG |
| 27 | 47_gb0 | cactatagggagacccaagctggctagccaccATgT |
| | | TTGTGTTCCTGGTGCTGCTGCCACT |
| | | GGTGTCCAGCCAGTGTGTGAACCTGACCACCAGGAC |
| | | CCAACTTCCTCCTGCCTACACCAACTCCTTCACCAG |
| | | GGGAGTCTACTACCCTGACAAGGTGTTCAGGTCCTC |
| | | TGTGCTGCACAGCACCCAGGACCTGTTCCTGCCATT |
| | | CTTCAGCAATGTGACCTGGTTCCATGTGATCTCTGG |
| | | CACCAATGGCACCAAGAGGTTTGACAACCCTGTGCT |
| | | GCCATTCAATGATGGAGTCTACTTTGCCAGCAtcGA |
| | | GAAGAGCAACATCATCAGGGGCTGGATTTTTGGCAC |
| | | CACCCTGGACAGCAAGACCCAGTCCCTGCTGATTGT |
| | | GAACAATGCCACCAATGTGGTGATTAAGGTGTGTGA |
| | | GTTCCAGTTCTGTAATGACCCATTCCTGGacCACAA |
| | | GAACAACAAGTCCTGGATG |
| 28 | 47_gb3 | CCCAATTGGAGCAGGCATCTGTGCCTCCTACCAGAC |
| | | CCAGACCAAgAGCCacAGGAGGGCAAGGTCTGTGGC |
| | | AAGCCAGAGCATCATTGCCTACACAATGAGTCTGGG |
| | | AGCAGAGAACTCTGTGGCTTACAGCAACAACAGCAT |
| | | TGCCATCCCAACCAACTTCACCATCTCTGTGACCAC |
| | | AGAGATTCTGCCTGTGAGTATGACCAAGACCTCTGT |
| | | GGACTGTACAATGTATATCTGTGGAGACAGCACAGA |
| | | GTGTAGCAACCTGCTGCTCCAATATGGCTCCTTCTG |
| | | TACCCAACTTAAgAGGGCTCTGACAGGCATTGCTGT |
| | | GGAACAGGACAAGAACACCCAGGAGGTGTTTGCCCA |
| | | GGTGAAGCAGATTTACAAGACACCTCCAATCAAGtA |
| | | CTTTGGAGGCTTCAACTTCAGCCAGATTCTGCCTGA |
| | | CCCAAGCAAGCCAAGCAAGAGGTCCTTCATTGAGGA |
| | | CCTGCTGTTCAACAAGGTGACCCTGGCTGATGCTGG |
| | | CTTCATCAAGCAATATGGAGACTGTCTGGGAGACAT |
| | | TGCTGCCAGGGACCTGATTTGTGCCCAGAAGTTCAA |
| | | gGGACTGACAGTGCTGCCTCCACTGCTGACAGATGA |
| | | GATGATTGCCCAATACACCTCTGCCCTGCTGGCTGG |
| | | CACCATCACCTCTGGCTGGACCTTTGGAGCAGGAGC |
| | | AGCCCTCCAAATCCCATTTGCTATGCAGATGGCTTA |
| | | CAGGTTCAATGGCATTGGAGTGACCCAGAATGTGCT |
| | | CTATGAGAACCAGAAACTGATTGCCAACCAGTTCAA |
| | | CTCTGCCATTGGCAAGATTCAGGACTCCCTGTCCAG |
| | | CACAGCCTCTGCCCTGGGCAAACTCCAAGATGTGGT |
| | | GAACCACAATGCCCAGGCTCTGAACACCCTGGTGAA |
| | | GCAACTTTCCAGCAAgTTTGGAGCCATCTCCTCTGT |
| | | GCTGAATGACATCttcAGCAGACTGGACAAGGTGGA |
| | | GGCTGAGGTCCAGATTGACAGACTG |
| 29 | CMV-F | CGCAAATGGGCGGTAGGCGTG |
| 30 | 47_F1 | GGGCTTCTCTGCCTTGGAACCAC |
| 31 | 47_F2 | GGCAACAAGCCATGTAATGGAGTG |
| 32 | 47_F3 | CTACACAATGAGTCTGGGAGCAGAG |

[0336] Cell Culture. HEK293T (ATCC CRL-3216), HEK293FT (Thermo Fisher Cat. No. R70007) and 293T-hACE2 (gifted from Dr Bieniasz′ lab) cell lines were maintained in Dulbecco's modified Eagle's medium (DMEM, Thermo fisher) supplemented with 10% Fetal bovine serum (Hyclone) and 1% penicillin-streptomycin (Gibco, final concentration penicillin 100 unit/ml, streptomycin 100 μg/ml), which is denoted as complete growth medium. Cells were split every 2 days at a split ratio of 1:4 when the confluency reached over 80%. Vero-E6 cells were cultured in Dulbecco's Modified Eagle Medium (DMEM) with 5% heat-inactivated fetal bovine serum (FBS).

[0337] In vitro mRNA transcription and vaccine formulation. A Hiscribe™ T7 ARCA mRNA Kit (with tailing) (NEB, Cat #E2060S) was used to in vitro transcribe codon-optimized mRNA encoding HexaPro spikes of SARS-CoV-2 WT and Omicron variant with 50% replacement of uridine by N1-methyl-pseudouridine. The DNA template was linearized before mRNA transcription and contained 5′ UTR, 3′ UTR and 3′polyA tail as flanking sequence of spike open reading frame.

[0338] The purified mRNA was generated by following NEB manufacturer's instructions and kept frozen at −80° C. until further use. The lipid nanoparticles mRNA was assembled using the NanoAssemblr® Ignite™ instrument (Precision Nanosystems) according to manufacturers' guidance. In brief, lipid mixture composed of 46.3% ALC-0315 (MedChemExpress, HY-138170), 1.6% ALC-0159 (MedChemExpress, HY-138300), 9.4% DSPC (Avanti polar lipids, 850365P) and 42.7% Cholesterol (Avanti polar lipids, 700100P), was mixed with prepared mRNA in 25 mM sodium acetate at pH 5.2 on Ignite instrument at a molar ratio of 6:1 (LNP: mRNA). The LNP encapsulated mRNA (LNP-mRNA) was buffer exchanged to PBS using 100 kDa Amicon filter (Macrosep Centrifugal Devices 100K, 89131-992). Sucrose was added as a cryoprotectant. The particle size of mRNA-LNP was determined by DLS device (DynaPro NanoStar, Wyatt, WDPN-06) and TEM described below. The encapsulation rate and mRNA concentration were quantified by Quant-iT™ RiboGreen™ RNA Assay (Thermo Fisher).

[0339] Validation of LNP-mRNA mediated spike expression in vitro and receptor binding capability of expressed Omicron HexaPro spikes. On day 1, HEK293T cells were seeded at 50% confluence in 24-well plate and mixed with 2 μg Omicron LNP-mRNA. After 16 hours, the cells were collected for flow cytometry. The spike expression on cell surface were detected by staining cells with human ACE2-Fc chimera (Sino Biological, 10108-H02HG) in MACS buffer (D-PBS with 2 mM EDTA and 0.5% BSA) for 20 min on ice. Cells were washed twice after the primary stain and incubated with PE-anti-human Fc antibody (Biolegend, Cat. No. 410708, Clone No. M1310G05, 1:100 dilution) in MACS buffer for 20 min on ice. During secondary antibody staining, live/Dead aqua fixable stain (Invitrogen) was used to assess cell viability. Data was collected on BD FACSAria II Cell Sorter (BD) and analyzed using FlowJo software (version 10.7.2, FlowJo LLC).

[0340] Negative-stain TEM. Formvar/carbon-coated copper grid (Electron Microscopy Sciences, catalog number FCF400-Cu-50) was glow-discharged and covered with 6 μl of the sample for 1 min before blotting away the sample. The sample was double-stained with 6 μl of 2% (w/v) uranyl formate (Electron Microscopy Sciences, catalog number 22450) for 5 seconds (first stain) and 1 min (second stain), blotting away after each stain. Images were collected using a JEOL JEM-1400 Plus microscope with an acceleration voltage of 80 kV and a bottom-mount charge-coupled device camera (4k by 3k, Advanced Microscopy Technologies).

[0341] Mouse vaccination. All experiments in this vaccine immunogenicity study used 6-8 weeks old female C57BL/6Ncr (B6) mice purchased from Charles River. The mice-housing condition was maintained at regular ambient room temperature (65-75° F., or 18-23° C.), 40-60% humidity, and a 14 h: 10 h day/night cycle. Each mice cage was individually ventilated with clean food, water, and bedding. Two sets of immunization experiments were performed: vaccination with Omicron LNP-mRNA, and sequential vaccination with WT LNP-mRNA, followed by WT or Omicron LNP mRNA booster. For the Omicron LNP-mRNA vaccination experiment, five mice were immunized with 10 μg Omicron LNP-mRNA on day 0 (prime) and day 14 (boost). Retro-orbital blood was collected prior to vaccine injection on day 0, day 13 and day 21. For WT and Omicron LNP-mRNA sequential vaccination experiment, 18 mice were administered with either 100 μl PBS (3+3 mice, two independent experiments) or two-dose 1 μg WT (on day 0 and day 21, 3+9 mice, two independent experiments) and 10 μg Omicron LNP-mRNA (over 3.5 months post prime). Retro-orbital blood was collected prior to vaccine injection on day 35, day 127, day 140 and day 148.

[0342] Isolation of plasma and PBMCs from blood. At the defined time points, retro-orbital blood was collected from mice. The isolation of PBMCs and plasma was achieved via centrifugation using SepMate-15 and Lymphoprep gradient medium (StemCell Technologies). 200 μl blood was immediately diluted with 800 μl PBS with 2% FBS. The blood diluent was then added to SepMate-15 tubes with 6 ml Lymphoprep (StemCell Technologies). Centrifugation at 1200 g for 20 minutes was used to isolate RBCs, PBMCs and plasma. 250 μl diluted plasma was collected from the surface layer. The remaining solution at the top layer was poured to a new tube to isolate PBMCs, which were washed once with PBS+2% FBS. The separated plasma was used in ELISA and neutralization assay.

[0343] ELISA. 3 μg/ml of spike antigens were coated onto the 384-well ELISA plates (VWR, Cat #82051-300) overnight at 4 degree. The antigen panel used in the ELISA includes RBDs of SARS RBD (AcroBiosystems, SPD-S52H6), MERS RBD (AcroBiosystems, SPD-M52H6), 2019-nCoV WA-1 (Sino Biological 40592-V08B), Delta variant B.1.617.2 (Sino Biological 40592-V08H90), Beta variant B.1.351 (Sino Biological 40592-V08H85) and Omicron variant B.1.1.529 (Sino Biological 40592-V08H121). Plates were washed with PBST (PBS plus 0.5% Tween 20) three times in the 50TS microplate washer (Fisher Scientific, NC0611021) and blocked with 0.5% BSA in PBST at room temperature for one hour. Plasma was fourfold serially diluted starting at a 1:500 dilution. Diluted plasma samples were added to the plates and incubated at room temperature for one hour, followed by washes with PBST five times. Anti-mouse secondary antibody (Fisher, Cat. No. A-10677) at 1:2500 dilution in blocking buffer was incubated at room temperature for one hour. Plates were washed five times and developed with tetramethylbenzidine substrate (Biolegend, 421101). The reaction was stopped with 1 M phosphoric acid after 20 min at room temperature, and OD at 450 nm was measured by multimode microplate reader (PerkinElmer EnVision 2105, Envision Manager v1.13.3009.1401). The binding response (OD450) was plotted against the dilution factor in log 10 scale as the dilution-dependent response curve. The area under curve of the dilution-dependent response (Log 10 AUC) was calculated to quantify the potency of the plasma antibody binding to spike antigens. The fold change of antibody titer was estimated using this equation: ratio=10\hat{ }(AUC1-AUC2).

[0344] hACE2 and antibody competition ELISA. The 384-well plate was coated with 0.6 μg/ml Omicron RBD at 4 degree overnight before washed with PBST (0.5% Tween-20) three times and blocked with 2% BSA in PBST for 1 hour at room temperature. In hACE2 and antibody competition ELISA, 15 μg/ml hACE2 (Sino, 10108-H08H) or 10 μg/ml antibodies including Clone 13A (Chen lab, in house), CR3022 (Abcam, Cat. No. Ab273073, Clone No. CR3022) and S309 (BioVision, Cat. No. A2266, Clone No. S309) were respectively added to the plate 1 hour prior to subsequent incubation with serially diluted plasma for another hour at room temperature. After coincubation of plasma and hACE2/antibodies, the plate was washed five times with PBST and incubated with anti-mouse secondary antibody with minimal cross reactivity with human IgG (Biolegend, Cat. No. 405306, Clone No. Poly4053, 1:2500 dilution). The plate was washed five times after 1-hour secondary antibody incubation and developed with tetramethylbenzidine substrate (Biolegend, 421101). The reaction was stopped with 1 M phosphoric acid after 20 min at room temperature, and OD at 450 nm was measured by multimode microplate reader (PerkinElmer En Vision 2105). The normalized AUC was calculated by normalizing the value with AUC determined in PBS group.

[0345] Omicron, WA-1 and Delta pseudovirus production and characterization. For the neutralization assay, HIV-1 based SARS-CoV-2 WA-1, B.1.617.2 (Delta) variant, and B.1.1.529 (Omicron) variant pseudotyped virions were packaged using a coronavirus spike plasmid, a reporter vector and a HIV-1 structural protein expression plasmid. The reporter vector, pCCNanoLuc2AEGFP, and plasmid expressing HIV-1 structural proteins (pHIVNLGagPol) were gifts from Dr Bieniasz's lab. The spike plasmid for SARS-CoV-2 WA-1 pseudovirus truncated C-terminal 19 amino acids (denoted as SARS-CoV-2-Δ19) and was from Dr Bieniasz′ lab. Spike plasmids expressing C-terminally truncated SARS-CoV-2 B.1.617.2 variant S protein (Delta variant-Δ19) and SARS-CoV-2 B.1.1.529 variant S protein (Omicron variant-Δ19) were made based on the pSARS-CoV-2-Δ19. All pseudoviruses were produced under the same conditions. Briefly, 293 FT cells were seeded in 150 mm plates, and transfected with 21 μg pHIVNLGagPol, 21 μg pCCNanoLuc2AEGFP, and 7.5 μg of corresponding plasmids, in the presence of 198 μl PEI (1 mg/ml, PEI MAX, Polyscience). At 48 h after transfection, the supernatant was filtered through a 0.45-μm filter, and frozen in −80° C.

[0346] To characterize the titer of WA-1, Delta, and Omicron pseudoviruses packaged, 1×104 293T-hACE2 cells were plated in each well of a 96-well plate. In the next day, different volumes of pseudovirus supplemented with culture medium to a total value of 100 μL were added into 96-well plates with 293T-hACE2. Plates were incubated at 37° C. for 24 hr. Then cells were washed with MACS buffer once and the percent of GFP-positive cells were counted by Attune NXT Acoustic Focusing Cytometer (Thermo Fisher, Attune N×T Software v3.1). To normalize pseudovirus titer, 1×104 293T-hACE2 cells were plated in each well of a 96-well plate. In the next day, 50 μL pseudovirus was mixed with 50 μL culture medium to 100 μL. The mixture was incubated for 1 hr in the 37° C. incubator, supplied with 5% CO2, and added into 96-well plates with 293T-hACE2. Plates were incubated at 37° C. for 24 hr. Then cells were washed with MACS buffer once and the percent of GFP-positive cells were counted by Attune NXT Acoustic Focusing Cytometer (Thermo Fisher). Delta pseudovirus and Omicron pseudovirus were diluted accordingly to match the functional titer of WA-1 pseudovirus for neutralization assay of plasma samples.

[0347] Pseudovirus neutralization assay. The SARS-CoV-2 pseudovirus assays were performed on 293T-hACE2 cells. One day before infection, 1×104 293T-hACE2 cells were plated in each well of a 96-well plate. In the next day, plasma collected from mice were serially diluted by 5 fold with complete growth medium at a starting dilution of 1:100. 55 μL diluted plasma was mixed with the same volume of SARS-CoV-2 WA-1, Delta variant, or Omicron variant pseudovirus and was incubated for 1 hr in the 37° C. incubator, supplied with 5% CO2. 100 μL of mixtures were added into 96-well plates with 293T-hACE2. Plates were incubated at 37° C. for 24 hr. Then cells were washed with MACS buffer once and the percent of GFP-positive cells were counted by Attune NXT Acoustic Focusing Cytometer (Thermo Fisher). The 50% inhibitory concentration (IC50) was calculated with a four-parameter logistic regression using GraphPad Prism (version 9.3.1, GraphPad Software Inc.). If the fitting value of IC50 is negative (i.e. negative titer), which suggested undetectable neutralization activity, the value was set to baseline (1, 0 in log scale).

[0348] Omicron and Delta live virus production and characterization. Full-length SARS-CoV-2 Omicron (BA.1) and Delta (B.1.617.2) isolates were a gift of Carolina Lucas and Akiko Iwasaki, and were isolated and sequenced. Remnant nasopharyngeal swap samples selected for virus isolation were diluted in DMEM by 10 fold and then filtered through a 45-μm filter. Tenfold serial dilution of samples was made from 1:50 to 1:19,531,250. The diluted samples were subsequently co-incubated with TMPRSS2-Vero E6 in a 96-well plate and adsorbed for 1 h at 37° C. Replacement medium was added after adsorption, and cells were incubated at 37° C. for up to 5 days. Supernatants from cells with cytopathic effect were collected, frozen, thawed and subjected to RT-qPCR.

[0349] To expand viral stocks, 107 Vero-E6 cells stably overexpressing ACE2 and TMPRSS2 were infected with SARS-CoV-2 at an MOI of approximately 0.01. The Omicron stock was collected 2 dpi, clarified by centrifugation (450×g for 10 minutes), filtered through a 0.45-micron filter, and concentrated ten-fold using Amicon Ultra-15 columns. To increase titer, the Delta stock was collected at 1 dpi, clarified, filtered, and used to infect 5×107 Vero-E6 cells overexpressing ACE2 and TMPRSS2. At 1 dpi, supernatant was harvested, clarified, filtered and concentrated as above. Viral stocks were titered by plaque assay in Vero-E6 cells. 7.5×105 and 4×105 Vero-E6 cells were seeded in each well of 6-well plates or 12-well plates. The media was replaced the next day with 100 μl of 10-fold serially diluted virus. Gentle rocking was applied to the plates incubated at 37° C. for 1 hour. Subsequently, overlay DMEM with 2% FBS and 0.6% Avicel RC-581 was added to each well. At 2 dpi for SARS-CoV-2, plates were fixed with 10% formaldehyde for 30 min, stained with crystal violet solution (0.5% crystal violet in 20% ethanol) for 30 min, and then rinsed with deionized water to visualize plaques.

[0350] Infectious virus neutralization assay. The complements and other potential neutralizing agents were heat inactivated in mouse plasma prior to infectious virus neutralization assay. Mouse plasma samples were serially diluted, then incubated with SARS-CoV-2 Omicron live virus for 1 h at 37° C. The Omicron live virus was isolated from nasopharyngeal specimens and sequenced as part of the Yale SARS-CoV-2 Genomic Surveillance Initiative's weekly surveillance Program in Connecticut65. After coincubation, plasma/virus mixture was added to Vero-E6 cells overexpressing ACE2/TMPRSS2. Cell viability was measured at 3 dpi or 5 dpi using CellTiter Glo.

[0351] Statistics and Reproducibility. Standard statistical methods were applied to non-high-throughput experimental data. The statistical methods are described in here, figure legends and/or supplementary Excel tables. Data on dot-bar plots are shown as mean±s.e.m. with individual data points in plots. Two-way ANOVA with Tukey's multiple comparisons test and one-way ANOVA with Dunnett's multiple comparisons test were used to assess statistical significance for grouped and non-grouped datasets respectively. Statistical significance labels: * p<0.05; ** p<0.01; *** p<0.001; **** p<0.0001. Non-significant comparisons are not shown, unless otherwise noted as n.s., not significant. Sample number is designated as n from biologically independent samples. Prism (version 9.3.2, GraphPad Software Inc.) and RStudio (version 1.3.959, RStudio software company) were used for these analyses. Additional information can be found in the supplementary excel tables. Most of the data were collected from one independent experiment unless specifically stated otherwise in figure legends. Over 40 TEM micrographs were collected at various magnifications in one independent experiment and a representative micrograph was shown in FIG. 22.

pZF46 Omicron Spike Hexapro mRNA
(SEQ ID NO: 55)
gacggatcgggagatctcccgatcccctatggtgcactctcagtacaatctgctctgatgccgcatag
ttaagccagtatctgctccctgcttgtgtgttggaggtcgctgagtagtgcgcgagcaaaatttaagc
tacaacaaggcaaggcttgaccgacaattgcatgaagaatctgcttagggttaggcgttttgcgctgc
ttcgcgatgtacgggccagatatacgcgttgacattgattattgactagttattaatagtaatcaatt
acggggtcattagttcatagcccatatatggagttccgcgttacataacttacggtaaatggcccgcc
tggctgaccgcccaacgacccccgcccattgacgtcaataatgacgtatgttcccatagtaacgccaa
tagggactttccattgacgtcaatgggtggagtatttacggtaaactgcccacttggcagtacatcaa
gtgtatcatatgccaagtacgccccctattgacgtcaatgacggtaaatggcccgcctggcattatgc
ccagtacatgaccttatgggactttcctacttggcagtacatctacgtattagtcatcgctattacca
tggtgatgcggttttggcagtacatcaatgggcgtggatagcggtttgactcacggggatttccaagt
ctccaccccattgacgtcaatgggagtttgttttggcaccaaaatcaacgggactttccaaaatgtcg
taacaactccgccccattgacgcaaatgggcggtaggcgtgtacggtgggaggtctatataagcagag
ctctctggctaactagagaacccactgcttactggcttatcgaaattaatacgactcactatagggag
acccaagctggctagccaccGAGAATAAACTAGTATTCTTCTGGTCCCCACAGACTCAGAGAGAACCC
GCCACCATgTTTGTGTTCCTGGTGCTGCTGCCACTGGTGTCCAGCCAGTGTGTGAACCTGACCACCAG
GACCCAACTTCCTCCTGCCTACACCAACTCCTTCACCAGGGGAGTCTACTACCCTGACAAGGTGTTCA
GGTCCTCTGTGCTGCACAGCACCCAGGACCTGTTCCTGCCATTCTTCAGCAATGTGACCTGGTTCCAT
GTGATCTCTGGCACCAATGGCACCAAGAGGTTTGACAACCCTGTGCTGCCATTCAATGATGGAGTCTA
CTTTGCCAGCAtcGAGAAGAGCAACATCATCAGGGGCTGGATTTTTGGCACCACCCTGGACAGCAAGA
CCCAGTCCCTGCTGATTGTGAACAATGCCACCAATGTGGTGATTAAGGTGTGTGAGTTCCAGTTCTGT
AATGACCCATTCCTGGacCACAAGAACAACAAGTCCTGGATGGAGTCTGAGTTCAGGGTCTACTCCTC
TGCCAACAACTGTACCTTTGAATATGTGAGCCAACCATTCCTGATGGACTTGGAGGGCAAGCAGGGCA
ACTTCAAGAACCTGAGGGAGTTTGTGTTCAAGAACATTGATGGCTACTTCAAGATTTACAGCAAACAC
ACACCAATCatcGTGAGGGAGCCCGAGGACCTGCCACAGGGCTTCTCTGCCTTGGAACCACTGGTGGA
CCTGCCAATTGGCATCAACATCACCAGGTTCCAGACCCTGCTGGCTCTGCACAGGTCCTACCTGACAC
CTGGAGACTCCTCCTCTGGCTGGACAGCAGGAGCAGCAGCCTACTATGTGGGCTACCTCCAACCAAGG
ACCTTCCTGCTGAAATACAATGAGAATGGCACCATCACAGATGCTGTGGACTGTGCCCTGGACCCACT
GTCTGAGACCAAGTGTACCCTGAAATCCTTCACAGTGGAGAAGGGCATCTACCAGACCAGCAACTTCA
GGGTCCAACCAACAGAGAGCATTGTGAGGTTTCCAAACATCACCAACCTGTGTCCATTTGacGAGGTG
TTCAAcGCCACCAGGTTTGCCTCTGTCTATGCCTGGAACAGGAAGAGGATTAGCAACTGTGTGGCTGA
CTACTCTGTGCTCTACAACctgGCCcCCTTCttCACCTTCAAGTGTTATGGAGTGAGCCCAACCAAAC
TGAATGACCTGTGTTTCACCAATGTCTATGCTGACTCCTTTGTGATTAGGGGAGATGAGGTGAGACAG
ATTGCCCCTGGACAAACAGGCAACATTGCTGACTACAACTACAAACTGCCTGATGACTTCACAGGCTG
TGTGATTGCCTGGAACAGCAACAAgCTGGACAGCAAGGTGagcGGCAACTACAACTACCTCTACAGAC
TGTTCAGGAAGAGCAACCTGAAACCATTTGAGAGGGACATCAGCACAGAGATTTACCAGGCTGGCAaC
AagCCATGTAATGGAGTGGCCGGCTTCAACTGTTACTTTCCACTCCggTCCTATaGCTTCCggCCAAC
CtacGGAGTGGGCcACCAACCATACAGGGTGGTGGTGCTGTCCTTTGAACTGCTCCATGCCCCTGCCA
CAGTGTGTGGACCAAAGAAGAGCACCAACCTGGTGAAGAACAAGTGTGTGAACTTCAACTTCAATGGA
CTGAagGGCACAGGAGTGCTGACAGAGAGCAACAAGAAGTTCCTGCCATTCCAACAGTTTGGCAGGGA
CATTGCTGACACCACAGATGCTGTGAGGGACCCACAGACCTTGGAGATTCTGGACATCACACCATGTT
CCTTTGGAGGAGTGTCTGTGATTACACCTGGCACCAACACCAGCAACCAGGTGGCTGTGCTCTACCAG
GgcGTGAACTGTACTGAGGTGCCTGTGGCTATCCATGCTGACCAACTTACACCAACCTGGAGGGTCTA
CAGCACAGGCAGCAATGTGTTCCAGACCAGGGCTGGCTGTCTGATTGGAGCAGAGtacGTGAACAACT
CCTATGAGTGTGACATCCCAATTGGAGCAGGCATCTGTGCCTCCTACCAGACCCAGACCAAgAGCCac
GGCTCTGCATCTTCTGTGGCAAGCCAGAGCATCATTGCCTACACAATGAGTCTGGGAGCAGAGAACTC
TGTGGCTTACAGCAACAACAGCATTGCCATCCCAACCAACTTCACCATCTCTGTGACCACAGAGATTC
TGCCTGTGAGTATGACCAAGACCTCTGTGGACTGTACAATGTATATCTGTGGAGACAGCACAGAGTGT
AGCAACCTGCTGCTCCAATATGGCTCCTTCTGTACCCAACTTAAgAGGGCTCTGACAGGCATTGCTGT
GGAACAGGACAAGAACACCCAGGAGGTGTTTGCCCAGGTGAAGCAGATTTACAAGACACCTCCAATCA
AGtACTTTGGAGGCTTCAACTTCAGCCAGATTCTGCCTGACCCAAGCAAGCCAAGCAAGAGGTCCCCT
ATTGAGGACCTGCTGTTCAACAAGGTGACCCTGGCTGATGCTGGCTTCATCAAGCAATATGGAGACTG
TCTGGGAGACATTGCTGCCAGGGACCTGATTTGTGCCCAGAAGTTCAAgGGACTGACAGTGCTGCCTC
CACTGCTGACAGATGAGATGATTGCCCAATACACCTCTGCCCTGCTGGCTGGCACCATCACCTCTGGC
TGGACCTTTGGAGCAGGACCAGCCCTCCAAATCCCATTTCCAATGCAGATGGCTTACAGGTTCAATGG
CATTGGAGTGACCCAGAATGTGCTCTATGAGAACCAGAAACTGATTGCCAACCAGTTCAACTCTGCCA
TTGGCAAGATTCAGGACTCCCTGTCCAGCACACCATCTGCCCTGGGCAAACTCCAAGATGTGGTGAAC
CAcAATGCCCAGGCTCTGAACACCCTGGTGAAGCAACTTTCCAGCAAgTTTGGAGCCATCTCCTCTGT
GCTGAATGACATCttcAGCAGACTGGACCCACCAGAGGCTGAGGTCCAGATTGACAGACTGATTACAG
GCAGACTCCAATCCCTCCAAACCTATGTGACCCAACAACTTATCAGGGCTGCTGAGATTAGGGCATCT
GCCAACCTGGCTGCCACCAAGATGAGTGAGTGTGTGCTGGGACAAAGCAAGAGGGTGGACTTCTGTGG
CAAGGGCTACCACCTGATGAGTTTTCCACAGTCTGCCCCTCATGGAGTGGTGTTCCTGCATGTGACCT
ATGTGCCTGCCCAGGAGAAGAACTTCACCACAGCCCCTGCCATCTGCCATGATGGCAAGGCTCACTTT
CCAAGGGAGGGAGTGTTTGTGAGCAATGGCACCCACTGGTTTGTGACCCAGAGGAACTTCTATGAACC
ACAGATTATCACCACAGACAACACCTTTGTGTCTGGCAACTGTGATGTGGTGATTGGCATTGTGAACA
ACACAGTCTATGACCCACTCCAACCTGAACTGGACTCCTTCAAGGAGGAACTGGACAAATACTTCAAG
AACCACACCAGCCCTGATGTGGACCTGGGAGACATCTCTGGCATCAATGCCTCTGTGGTGAACATCCA
GAAGGAGATTGACAGACTGAATGAGGTGGCTAAGAACCTGAATGAGTCCCTGATTGACCTCCAAGAAC
TGGGCAAATATGAACAATACATCAAGTGGCCATGGTACATCTGGCTGGGCTTCATTGCTGGACTGATT
GCCATTGTGATGGTGACCATAATGCTGTGTTGTATGACCTCCTGTTGTTCCTGTCTGAAAGGCTGTTG
TTCCTGTGGCTCCTGTTGTAAGTTTGATGAGGATGACTCTGAACCTGTGCTGAAAGGAGTGAAACTGC
ACTACACCTGACTCGAGCTGGTACTGCATGCACGCAATGCTAGCTGCCCCTTTCCCGTCCTGGGTACC
CCGAGTCTCCCCCGACCTCGGGTCCCAGGTATGCTCCCACCTCCACCTGCCCCACTCACCACCTCTGC
TAGTTCCAGACACCTCCCAAGCACGCAGCAATGCAGCTCAAAACGCTTAGCCTAGCCACACCCCCACG
GGAAACAGCAGTGATTAACCTTTAGCAATAAACGAAAGTTTAACTAAGCTATACTAACCCCAGGGTTG
GTCAATTTCGTGCCAGCCACACCCTGGAGCTAGCaaaccgctgatcagcctcgactgtgccttctagt
tgccagccatctgttgtttgcccctcccccgtgccttccttgaccctggaaggtgccactcccactgt
cctttcctaataaaatgaggaaattgcatcgcattgtctgagtaggtgtcattctattctggggggtg
gggtggggcaggacagcaagggggaggattgggaagacaatagcaggcatgctggggatgcggtgggc
tctatggcttctgaggcggaaagaaccagctggggctctagggggtatccccacgcgccctgtagcgg
cgcattaagcgcggcgggtgtggtggttacgcgcagcgtgaccgctacacttgccagcgccctagcgc
ccgctcctttcgctttcttcccttcctttctcgccacgttcgccggctttccccgtcaagctctaaat
cgggggctccctttagggttccgatttagtgctttacggcacctcgaccccaaaaaacttgattaggg
tgatggttcacgtagtgggccatcgccctgatagacggtttttcgccctttgacgttggagtccacgt
tctttaatagtggactcttgttccaaactggaacaacactcaaccctatctcggtctattcttttgat
ttataagggattttgccgatttcggcctattggttaaaaaatgagctgatttaacaaaaatttaacgc
gaattaattctgtggaatgtgtgtcagttagggtgtggaaagtccccaggctccccagcaggcagaag
tatgcaaagcatgcatctcaattagtcagcaaccaggtgtggaaagtccccaggctccccagcaggca
gaagtatgcaaagcatgcatctcaattagtcagcaaccatagtcccgcccctaactccgcccatcccg
cccctaactccgcccagttccgcccattctccgccccatggctgactaattttttttatttatgcaga
ggccgaggccgcctctgcctctgagctattccagaagtagtgaggaggcttttttggaggcctaggct
tttgcaaaaagctcccgggagcttgtatatccattttcggatctgatcaagagacaggatgaggatcg
tttcgcatgattgaacaagatggattgcacgcaggttctccggccgcttgggtggagaggctattcgg
ctatgactgggcacaacagacaatcggctgctctgatgccgccgtgttccggctgtcagcgcaggggc
gcccggttctttttgtcaagaccgacctgtccggtgccctgaatgaactgcaggacgaggcagcgcgg
ctatcgtggctggccacgacgggcgttccttgcgcagctgtgctcgacgttgtcactgaagcgggaag
ggactggctgctattgggcgaagtgccggggcaggatctcctgtcatctcaccttgctcctgccgaga
aagtatccatcatggctgatgcaatgcggcggctgcatacgcttgatccggctacctgcccattcgac
caccaagcgaaacatcgcatcgagcgagcacgtactcggatggaagccggtcttgtcgatcaggatga
tctggacgaagagcatcaggggctcgcgccagccgaactgttcgccaggctcaaggcgcgcatgcccg
acggcgaggatctcgtcgtgacccatggcgatgcctgcttgccgaatatcatggtggaaaatggccgc
ttttctggattcatcgactgtggccggctgggtgtggcggaccgctatcaggacatagcgttggctac
ccgtgatattgctgaagagcttggcggcgaatgggctgaccgcttcctcgtgctttacggtatcgccg
ctcccgattcgcagcgcatcgccttctatcgccttcttgacgagttcttctgagcgggactctggggt
tcgaaatgaccgaccaagcgacgcccaacctgccatcacgagatttcgattccaccgccgccttctat
gaaaggttgggcttcggaatcgttttccgggacgccggctggatgatcctccagcgcggggatctcat
gctggagttcttcgcccaccccaacttgtttattgcagcttataatggttacaaataaagcaatagca
tcacaaatttcacaaataaagcatttttttcactgcattctagttgtggtttgtccaaactcatcaat
gtatcttatcatgtctgtataccgtcgacctctagctagagcttggcgtaatcatggtcatagctgtt
tcctgtgtgaaattgttatccgctcacaattccacacaacatacgagccggaagcataaagtgtaaag
cctggggtgcctaatgagtgagctaactcacattaattgcgttgcgctcactgcccgctttccagtcg
ggaaacctgtcgtgccagctgcattaatgaatcggccaacgcgcggggagaggcggtttgcgtattgg
gcgctcttccgcttcctcgctcactgactcgctgcgctcggtcgttcggctgcggcgagcggtatcag
ctcactcaaaggcggtaatacggttatccacagaatcaggggataacgcaggaaagaacatgtgagca
aaaggccagcaaaaggccaggaaccgtaaaaaggccgcgttgctggcgtttttccataggctccgccc
ccctgacgagcatcacaaaaatcgacgctcaagtcagaggtggcgaaacccgacaggactataaagat
accaggcgtttccccctggaagctccctcgtgcgctctcctgttccgaccctgccgcttaccggatac
ctgtccgcctttctcccttcgggaagcgtggcgctttctcatagctcacgctgtaggtatctcagttc
ggtgtaggtcgttcgctccaagctgggctgtgtgcacgaaccccccgttcagcccgaccgctgcgcct
tatccggtaactatcgtcttgagtccaacccggtaagacacgacttatcgccactggcagcagccact
ggtaacaggattagcagagcgaggtatgtaggcggtgctacagagttcttgaagtggtggcctaacta
cggctacactagaagaacagtatttggtatctgcgctctgctgaagccagttaccttcggaaaaagag
ttggtagctcttgatccggcaaacaaaccaccgctggtagcggtggtttttttgtttgcaagcagcag
attacgcgcagaaaaaaaggatctcaagaagatcctttgatcttttctacggggtctgacgctcagtg
gaacgaaaactcacgttaagggattttggtcatgagattatcaaaaaggatcttcacctagatccttt
taaattaaaaatgaagttttaaatcaatctaaagtatatatgagtaaacttggtctgacagttaccaa
tgcttaatcagtgaggcacctatctcagcgatctgtctatttcgttcatccatagttgcctgactccc
cgtcgtgtagataactacgatacgggagggcttaccatctggccccagtgctgcaatgataccgcgag
acccacgctcaccggctccagatttatcagcaataaaccagccagccggaagggccgagcgcagaagt
ggtcctgcaactttatccgcctccatccagtctattaattgttgccgggaagctagagtaagtagttc
gccagttaatagtttgcgcaacgttgttgccattgctacaggcatcgtggtgtcacgctcgtcgtttg
gtatggcttcattcagctccggttcccaacgatcaaggcgagttacatgatcccccatgttgtgcaaa
aaagcggttagctccttcggtcctccgatcgttgtcagaagtaagttggccgcagtgttatcactcat
ggttatggcagcactgcataattctcttactgtcatgccatccgtaagatgcttttctgtgactggtg
agtactcaaccaagtcattctgagaatagtgtatgcggcgaccgagttgctcttgcccggcgtcaata
cgggataataccgcgccacatagcagaactttaaaagtgctcatcattggaaaacgttcttcggggcg
aaaactctcaaggatcttaccgctgttgagatccagttcgatgtaacccactcgtgcacccaactgat
cttcagcatcttttactttcaccagcgtttctgggtgagcaaaaacaggaaggcaaaatgccgcaaaa
aagggaataagggcgacacggaaatgttgaatactcatactcttcctttttcaatattattgaagcat
ttatcagggttattgtctcatgagcggatacatatttgaatgtatttagaaaaataaacaaatagggg
ttccgcgcacatttccccgaaaagtgccacctgacgtc
pZF47 Omicron Spike Pseudovirus Del19
(SEQ ID NO: 56)
gacggatcgggagatctcccgatcccctatggtgcactctcagtacaatctgctctgatgccgcatag
ttaagccagtatctgctccctgcttgtgtgttggaggtcgctgagtagtgcgcgagcaaaatttaagc
tacaacaaggcaaggcttgaccgacaattgcatgaagaatctgcttagggttaggcgttttgcgctgc
ttcgcgatgtacgggccagatatacgcgttgacattgattattgactagttattaatagtaatcaatt
acggggtcattagttcatagcccatatatggagttccgcgttacataacttacggtaaatggcccgcc
tggctgaccgcccaacgacccccgcccattgacgtcaataatgacgtatgttcccatagtaacgccaa
tagggactttccattgacgtcaatgggtggagtatttacggtaaactgcccacttggcagtacatcaa
gtgtatcatatgccaagtacgccccctattgacgtcaatgacggtaaatggcccgcctggcattatgc
ccagtacatgaccttatgggactttcctacttggcagtacatctacgtattagtcatcgctattacca
tggtgatgcggttttggcagtacatcaatgggcgtggatagcggtttgactcacggggatttccaagt
ctccaccccattgacgtcaatgggagtttgttttggcaccaaaatcaacgggactttccaaaatgtcg
taacaactccgccccattgacgcaaatgggcggtaggcgtgtacggtgggaggtctatataagcagag
ctctctggctaactagagaacccactgcttactggcttatcgaaattaatacgactcactatagggag
acccaagctggctagccaccATgTTTGTGTTCCTGGTGCTGCTGCCACTGGTGTCCAGCCAGTGTGTG
AACCTGACCACCAGGACCCAACTTCCTCCTGCCTACACCAACTCCTTCACCAGGGGAGTCTACTACCC
TGACAAGGTGTTCAGGTCCTCTGTGCTGCACAGCACCCAGGACCTGTTCCTGCCATTCTTCAGCAATG
TGACCTGGTTCCATGTGATCTCTGGCACCAATGGCACCAAGAGGTTTGACAACCCTGTGCTGCCATTC
AATGATGGAGTCTACTTTGCCAGCAtcGAGAAGAGCAACATCATCAGGGGCTGGATTTTTGGCACCAC
CCTGGACAGCAAGACCCAGTCCCTGCTGATTGTGAACAATGCCACCAATGTGGTGATTAAGGTGTGTG
AGTTCCAGTTCTGTAATGACCCATTCCTGGacCACAAGAACAACAAGTCCTGGATGGAGTCTGAGTTC
AGGGTCTACTCCTCTGCCAACAACTGTACCTTTGAATATGTGAGCCAACCATTCCTGATGGACTTGGA
GGGCAAGCAGGGCAACTTCAAGAACCTGAGGGAGTTTGTGTTCAAGAACATTGATGGCTACTTCAAGA
TTTACAGCAAACACACACCAATCatcGTGAGGGAGCCCGAGGACCTGCCACAGGGCTTCTCTGCCTTG
GAACCACTGGTGGACCTGCCAATTGGCATCAACATCACCAGGTTCCAGACCCTGCTGGCTCTGCACAG
GTCCTACCTGACACCTGGAGACTCCTCCTCTGGCTGGACAGCAGGAGCAGCAGCCTACTATGTGGGCT
ACCTCCAACCAAGGACCTTCCTGCTGAAATACAATGAGAATGGCACCATCACAGATGCTGTGGACTGT
GCCCTGGACCCACTGTCTGAGACCAAGTGTACCCTGAAATCCTTCACAGTGGAGAAGGGCATCTACCA
GACCAGCAACTTCAGGGTCCAACCAACAGAGAGCATTGTGAGGTTTCCAAACATCACCAACCTGTGTC
CATTTGacGAGGTGTTCAAcGCCACCAGGTTTGCCTCTGTCTATGCCTGGAACAGGAAGAGGATTAGC
AACTGTGTGGCTGACTACTCTGTGCTCTACAACctgGCCcCCTTCttCACCTTCAAGTGTTATGGAGT
GAGCCCAACCAAACTGAATGACCTGTGTTTCACCAATGTCTATGCTGACTCCTTTGTGATTAGGGGAG
ATGAGGTGAGACAGATTGCCCCTGGACAAACAGGCAACATTGCTGACTACAACTACAAACTGCCTGAT
GACTTCACAGGCTGTGTGATTGCCTGGAACAGCAACAAgCTGGACAGCAAGGTGagcGGCAACTACAA
CTACCTCTACAGACTGTTCAGGAAGAGCAACCTGAAACCATTTGAGAGGGACATCAGCACAGAGATTT
ACCAGGCTGGCAaCAagCCATGTAATGGAGTGGccGGCTTCAACTGTTACTTTCCACTCCggTCCTAT
aGCTTCCggCCAACCtacGGAGTGGGCcACCAACCATACAGGGTGGTGGTGCTGTCCTTTGAACTGCT
CCATGCCCCTGCCACAGTGTGTGGACCAAAGAAGAGCACCAACCTGGTGAAGAACAAGTGTGTGAACT
TCAACTTCAATGGACTGAagGGCACAGGAGTGCTGACAGAGAGCAACAAGAAGTTCCTGCCATTCCAA
CAGTTTGGCAGGGACATTGCTGACACCACAGATGCTGTGAGGGACCCACAGACCTTGGAGATTCTGGA
CATCACACCATGTTCCTTTGGAGGAGTGTCTGTGATTACACCTGGCACCAACACCAGCAACCAGGTGG
CTGTGCTCTACCAGGgcGTGAACTGTACTGAGGTGCCTGTGGCTATCCATGCTGACCAACTTACACCA
ACCTGGAGGGTCTACAGCACAGGCAGCAATGTGTTCCAGACCAGGGCTGGCTGTCTGATTGGAGCAGA
GtacGTGAACAACTCCTATGAGTGTGACATCCCAATTGGAGCAGGCATCTGTGCCTCCTACCAGACCC
AGACCAAgAGCCacAGGAGGGCAAGGTCTGTGGCAAGCCAGAGCATCATTGCCTACACAATGAGTCTG
GGAGCAGAGAACTCTGTGGCTTACAGCAACAACAGCATTGCCATCCCAACCAACTTCACCATCTCTGT
GACCACAGAGATTCTGCCTGTGAGTATGACCAAGACCTCTGTGGACTGTACAATGTATATCTGTGGAG
ACAGCACAGAGTGTAGCAACCTGCTGCTCCAATATGGCTCCTTCTGTACCCAACTTAAgAGGGCTCTG
ACAGGCATTGCTGTGGAACAGGACAAGAACACCCAGGAGGTGTTTGCCCAGGTGAAGCAGATTTACAA
GACACCTCCAATCAAGtACTTTGGAGGCTTCAACTTCAGCCAGATTCTGCCTGACCCAAGCAAGCCAA
GCAAGAGGTCCTTCATTGAGGACCTGCTGTTCAACAAGGTGACCCTGGCTGATGCTGGCTTCATCAAG
CAATATGGAGACTGTCTGGGAGACATTGCTGCCAGGGACCTGATTTGTGCCCAGAAGTTCAAgGGACT
GACAGTGCTGCCTCCACTGCTGACAGATGAGATGATTGCCCAATACACCTCTGCCCTGCTGGCTGGCA
CCATCACCTCTGGCTGGACCTTTGGAGCAGGAGCAGCCCTCCAAATCCCATTTGCTATGCAGATGGCT
TACAGGTTCAATGGCATTGGAGTGACCCAGAATGTGCTCTATGAGAACCAGAAACTGATTGCCAACCA
GTTCAACTCTGCCATTGGCAAGATTCAGGACTCCCTGTCCAGCACAGCCTCTGCCCTGGGCAAACTCC
AAGATGTGGTGAACCACAATGCCCAGGCTCTGAACACCCTGGTGAAGCAACTTTCCAGCAAgTTTGGA
GCCATCTCCTCTGTGCTGAATGACATCttcAGCAGACTGGACAAGGTGGAGGCTGAGGTCCAGATTGA
CAGACTGATTACAGGCAGACTCCAATCCCTCCAAACCTATGTGACCCAACAACTTATCAGGGCTGCTG
AGATTAGGGCATCTGCCAACCTGGCTGCCACCAAGATGAGTGAGTGTGTGCTGGGACAAAGCAAGAGG
GTGGACTTCTGTGGCAAGGGCTACCACCTGATGAGTTTTCCACAGTCTGCCCCTCATGGAGTGGTGTT
CCTGCATGTGACCTATGTGCCTGCCCAGGAGAAGAACTTCACCACAGCCCCTGCCATCTGCCATGATG
GCAAGGCTCACTTTCCAAGGGAGGGAGTGTTTGTGAGCAATGGCACCCACTGGTTTGTGACCCAGAGG
AACTTCTATGAACCACAGATTATCACCACAGACAACACCTTTGTGTCTGGCAACTGTGATGTGGTGAT
TGGCATTGTGAACAACACAGTCTATGACCCACTCCAACCTGAACTGGACTCCTTCAAGGAGGAACTGG
ACAAATACTTCAAGAACCACACCAGCCCTGATGTGGACCTGGGAGACATCTCTGGCATCAATGCCTCT
GTGGTGAACATCCAGAAGGAGATTGACAGACTGAATGAGGTGGCTAAGAACCTGAATGAGTCCCTGAT
TGACCTCCAAGAACTGGGCAAATATGAACAATACATCAAGTGGCCATGGTACATCTGGCTGGGCTTCA
TTGCTGGACTGATTGCCATTGTGATGGTGACCATAATGCTGTGTTGTATGACCTCCTGTTGTTCCTGT
CTGAAAGGCTGTTGTTCCTGTGGCTCCTGTTGTTGAggatccgagctcggtaccaagcttaagtttaa
accgctgatcagcctcgactgtgccttctagttgccagccatctgttgtttgcccctcccccgtgcct
tccttgaccctggaaggtgccactcccactgtcctttcctaataaaatgaggaaattgcatcgcattg
tctgagtaggtgtcattctattctggggggtggggtggggcaggacagcaagggggaggattgggaag
acaatagcaggcatgctggggatgcggtgggctctatggcttctgaggcggaaagaaccagctggggc
tctagggggtatccccacgcgccctgtagcggcgcattaagcgcggcgggtgtggtggttacgcgcag
cgtgaccgctacacttgccagcgccctagcgcccgctcctttcgctttcttcccttcctttctcgcca
cgttcgccggctttccccgtcaagctctaaatcgggggctccctttagggttccgatttagtgcttta
cggcacctcgaccccaaaaaacttgattagggtgatggttcacgtagtgggccatcgccctgatagac
ggtttttcgccctttgacgttggagtccacgttctttaatagtggactcttgttccaaactggaacaa
cactcaaccctatctcggtctattcttttgatttataagggattttgccgatttcggcctattggtta
aaaaatgagctgatttaacaaaaatttaacgcgaattaattctgtggaatgtgtgtcagttagggtgt
ggaaagtccccaggctccccagcaggcagaagtatgcaaagcatgcatctcaattagtcagcaaccag
gtgtggaaagtccccaggctccccagcaggcagaagtatgcaaagcatgcatctcaattagtcagcaa
ccatagtcccgcccctaactccgcccatcccgcccctaactccgcccagttccgcccattctccgccc
catggctgactaattttttttatttatgcagaggccgaggccgcctctgcctctgagctattccagaa
gtagtgaggaggcttttttggaggcctaggcttttgcaaaaagctcccgggagcttgtatatccattt
tcggatctgatcaagagacaggatgaggatcgtttcgcatgattgaacaagatggattgcacgcaggt
tctccggccgcttgggtggagaggctattcggctatgactgggcacaacagacaatcggctgctctga
tgccgccgtgttccggctgtcagcgcaggggcgcccggttctttttgtcaagaccgacctgtccggtg
ccctgaatgaactgcaggacgaggcagcgcggctatcgtggctggccacgacgggcgttccttgcgca
gctgtgctcgacgttgtcactgaagcgggaagggactggctgctattgggcgaagtgccggggcagga
tctcctgtcatctcaccttgctcctgccgagaaagtatccatcatggctgatgcaatgcggcggctgc
atacgcttgatccggctacctgcccattcgaccaccaagcgaaacatcgcatcgagcgagcacgtact
cggatggaagccggtcttgtcgatcaggatgatctggacgaagagcatcaggggctcgcgccagccga
actgttcgccaggctcaaggcgcgcatgcccgacggcgaggatctcgtcgtgacccatggcgatgcct
gcttgccgaatatcatggtggaaaatggccgcttttctggattcatcgactgtggccggctgggtgtg
gcggaccgctatcaggacatagcgttggctacccgtgatattgctgaagagcttggcggcgaatgggc
tgaccgcttcctcgtgctttacggtatcgccgctcccgattcgcagcgcatcgccttctatcgccttc
ttgacgagttcttctgagcgggactctggggttcgaaatgaccgaccaagcgacgcccaacctgccat
cacgagatttcgattccaccgccgccttctatgaaaggttgggcttcggaatcgttttccgggacgcc
ggctggatgatcctccagcgcggggatctcatgctggagttcttcgcccaccccaacttgtttattgc
agcttataatggttacaaataaagcaatagcatcacaaatttcacaaataaagcatttttttcactgc
attctagttgtggtttgtccaaactcatcaatgtatcttatcatgtctgtataccgtcgacctctagc
tagagcttggcgtaatcatggtcatagctgtttcctgtgtgaaattgttatccgctcacaattccaca
caacatacgagccggaagcataaagtgtaaagcctggggtgcctaatgagtgagctaactcacattaa
ttgcgttgcgctcactgcccgctttccagtcgggaaacctgtcgtgccagctgcattaatgaatcggc
caacgcgcggggagaggcggtttgcgtattgggcgctcttccgcttcctcgctcactgactcgctgcg
ctcggtcgttcggctgcggcgagcggtatcagctcactcaaaggcggtaatacggttatccacagaat
caggggataacgcaggaaagaacatgtgagcaaaaggccagcaaaaggccaggaaccgtaaaaaggcc
gcgttgctggcgtttttccataggctccgcccccctgacgagcatcacaaaaatcgacgctcaagtca
gaggtggcgaaacccgacaggactataaagataccaggcgtttccccctggaagctccctcgtgcgct
ctcctgttccgaccctgccgcttaccggatacctgtccgcctttctcccttcgggaagcgtggcgctt
tctcatagctcacgctgtaggtatctcagttcggtgtaggtcgttcgctccaagctgggctgtgtgca
cgaaccccccgttcagcccgaccgctgcgccttatccggtaactatcgtcttgagtccaacccggtaa
gacacgacttatcgccactggcagcagccactggtaacaggattagcagagcgaggtatgtaggcggt
gctacagagttcttgaagtggtggcctaactacggctacactagaagaacagtatttggtatctgcgc
tctgctgaagccagttaccttcggaaaaagagttggtagctcttgatccggcaaacaaaccaccgctg
gtagcggtggtttttttgtttgcaagcagcagattacgcgcagaaaaaaaggatctcaagaagatcct
ttgatcttttctacggggtctgacgctcagtggaacgaaaactcacgttaagggattttggtcatgag
attatcaaaaaggatcttcacctagatccttttaaattaaaaatgaagttttaaatcaatctaaagta
tatatgagtaaacttggtctgacagttaccaatgcttaatcagtgaggcacctatctcagcgatctgt
ctatttcgttcatccatagttgcctgactccccgtcgtgtagataactacgatacgggagggcttacc
atctggccccagtgctgcaatgataccgcgagacccacgctcaccggctccagatttatcagcaataa
accagccagccggaagggccgagcgcagaagtggtcctgcaactttatccgcctccatccagtctatt
aattgttgccgggaagctagagtaagtagttcgccagttaatagtttgcgcaacgttgttgccattgc
tacaggcatcgtggtgtcacgctcgtcgtttggtatggcttcattcagctccggttcccaacgatcaa
ggcgagttacatgatcccccatgttgtgcaaaaaagcggttagctccttcggtcctccgatcgttgtc
agaagtaagttggccgcagtgttatcactcatggttatggcagcactgcataattctcttactgtcat
gccatccgtaagatgcttttctgtgactggtgagtactcaaccaagtcattctgagaatagtgtatgc
ggcgaccgagttgctcttgcccggcgtcaatacgggataataccgcgccacatagcagaactttaaaa
gtgctcatcattggaaaacgttcttcggggcgaaaactctcaaggatcttaccgctgttgagatccag
ttcgatgtaacccactcgtgcacccaactgatcttcagcatcttttactttcaccagcgtttctgggt
gagcaaaaacaggaaggcaaaatgccgcaaaaaagggaataagggcgacacggaaatgttgaatactc
atactcttcctttttcaatattattgaagcatttatcagggttattgtctcatgagcggatacatatt
tgaatgtatttagaaaaataaacaaataggggttccgcgcacatttccccgaaaagtgccacctgacg
tc
pZF56 Omicron BA.2 Spike Hexapro mRNA
(SEQ ID NO: 33)
gacggatcgggagatctcccgatcccctatggtgcactctcagtacaatctgctctgatgccgcatag
ttaagccagtatctgctccctgcttgtgtgttggaggtcgctgagtagtgcgcgagcaaaatttaagc
tacaacaaggcaaggcttgaccgacaattgcatgaagaatctgcttagggttaggcgttttgcgctgc
ttcgcgatgtacgggccagatatacgcgttgacattgattattgactagttattaatagtaatcaatt
acggggtcattagttcatagcccatatatggagttccgcgttacataacttacggtaaatggcccgcc
tggctgaccgcccaacgacccccgcccattgacgtcaataatgacgtatgttcccatagtaacgccaa
tagggactttccattgacgtcaatgggtggagtatttacggtaaactgcccacttggcagtacatcaa
gtgtatcatatgccaagtacgccccctattgacgtcaatgacggtaaatggcccgcctggcattatgc
ccagtacatgaccttatgggactttcctacttggcagtacatctacgtattagtcatcgctattacca
tggtgatgcggttttggcagtacatcaatgggcgtggatagcggtttgactcacggggatttccaagt
ctccaccccattgacgtcaatgggagtttgttttggcaccaaaatcaacgggactttccaaaatgtcg
taacaactccgccccattgacgcaaatgggcggtaggcgtgtacggtgggaggtctatataagcagag
ctctctggctaactagagaacccactgcttactggcttatcgaaattaatacgactcactatagggag
acccaagctggctagccaccGAGAATAAACTAGTATTCTTCTGGTCCCCACAGACTCAGAGAGAACCC
GCCACCATgTTTGTGTTCCTGGTGCTGCTGCCACTGGTGTCCAGCCAGTGTGTGAACCTGATCACCAG
GACCCAAAGCTACACCAACTCCTTCACCAGGGGAGTCTACTACCCTGACAAGGTGTTCAGGTCCTCTG
TGCTGCACAGCACCCAGGACCTGTTCCTGCCATTCTTCAGCAATGTGACCTGGTTCCATGCCATCCAC
GTGTCTGGCACCAATGGCACCAAGAGGTTTGACAACCCTGTGCTGCCATTCAATGATGGAGTCTACTT
TGCCAGCACCGAGAAGAGCAACATCATCAGGGGCTGGATTTTTGGCACCACCCTGGACAGCAAGACCC
AGTCCCTGCTGATTGTGAACAATGCCACCAATGTGGTGATTAAGGTGTGTGAGTTCCAGTTCTGTAAT
GACCCATTCCTGGacGTGTACTACCACAAGAACAACAAGTCCTGGATGGAGTCTGAGTTCAGGGTCTA
CTCCTCTGCCAACAACTGTACCTTTGAATATGTGAGCCAACCATTCCTGATGGACTTGGAGGGCAAGC
AGGGCAACTTCAAGAACCTGAGGGAGTTTGTGTTCAAGAACATTGATGGCTACTTCAAGATTTACAGC
AAACACACACCAATCAACCTGGGCAGAGACCTGCCACAGGGCTTCTCTGCCTTGGAACCACTGGTGGA
CCTGCCAATTGGCATCAACATCACCAGGTTCCAGACCCTGCTGGCTCTGCACAGGTCCTACCTGACAC
CTGGAGACTCCTCCTCTGGCTGGACAGCAGGAGCAGCAGCCTACTATGTGGGCTACCTCCAACCAAGG
ACCTTCCTGCTGAAATACAATGAGAATGGCACCATCACAGATGCTGTGGACTGTGCCCTGGACCCACT
GTCTGAGACCAAGTGTACCCTGAAATCCTTCACAGTGGAGAAGGGCATCTACCAGACCAGCAACTTCA
GGGTCCAACCAACAGAGAGCATTGTGAGGTTTCCAAACATCACCAACCTGTGTCCATTTGacGAGGTG
TTCAAcGCCACCAGGTTTGCCTCTGTCTATGCCTGGAACAGGAAGAGGATTAGCAACTGTGTGGCTGA
CTACTCTGTGCTCTACAACTTCGCCcCCTTCttCGCCTTCAAGTGTTATGGAGTGAGCCCAACCAAAC
TGAATGACCTGTGTTTCACCAATGTCTATGCTGACTCCTTTGTGATTAGGGGAAACGAGGTGAGCCAG
ATTGCCCCTGGACAAACAGGCAAcATTGCTGACTACAACTACAAACTGCCTGATGACTTCACAGGCTG
TGTGATTGCCTGGAACAGCAACAAgCTGGACAGCAAGGTGGGCGGCAACTACAACTACCTCTACAGAC
TGTTCAGGAAGAGCAACCTGAAACCATTTGAGAGGGACATCAGCACAGAGATTTACCAGGCTGGCAaC
AagCCATGTAATGGAGTGGCCGGCTTCAACTGTTACTTTCCACTCCggTCCTATGGCTTCCggCCAAC
CtacGGAGTGGGCCACCAACCATACAGGGTGGTGGTGCTGTCCTTTGAACTGCTCCATGCCCCTGCCA
CAGTGTGTGGACCAAAGAAGAGCACCAACCTGGTGAAGAACAAGTGTGTGAACTTCAACTTCAATGGA
CTGACCGGCACAGGAGTGCTGACAGAGAGCAACAAGAAGTTCCTGCCATTCCAACAGTTTGGCAGGGA
CATTGCTGACACCACAGATGCTGTGAGGGACCCACAGACCTTGGAGATTCTGGACATCACACCATGTT
CCTTTGGAGGAGTGTCTGTGATTACACCTGGCACCAACACCAGCAACCAGGTGGCTGTGCTCTACCAG
GgcGTGAACTGTACTGAGGTGCCTGTGGCTATCCATGCTGACCAACTTACACCAACCTGGAGGGTCTA
CAGCACAGGCAGCAATGTGTTCCAGACCAGGGCTGGCTGTCTGATTGGAGCAGAGtacGTGAACAACT
CCTATGAGTGTGACATCCCAATTGGAGCAGGCATCTGTGCCTCCTACCAGACCCAGACCAAgAGCCac
AGGAGGGCAAGGTCTGTGGCAAGCCAGAGCATCATTGCCTACACAATGAGTCTGGGAGCAGAGAACTC
TGTGGCTTACAGCAACAACAGCATTGCCATCCCAACCAACTTCACCATCTCTGTGACCACAGAGATTC
TGCCTGTGAGTATGACCAAGACCTCTGTGGACTGTACAATGTATATCTGTGGAGACAGCACAGAGTGT
AGCAACCTGCTGCTCCAATATGGCTCCTTCTGTACCCAACTTAAgAGGGCTCTGACAGGCATTGCTGT
GGAACAGGACAAGAACACCCAGGAGGTGTTTGCCCAGGTGAAGCAGATTTACAAGACACCTCCAATCA
AGtACTTTGGAGGCTTCAACTTCAGCCAGATTCTGCCTGACCCAAGCAAGCCAAGCAAGAGGTCCCCT
ATTGAGGACCTGCTGTTCAACAAGGTGACCCTGGCTGATGCTGGCTTCATCAAGCAATATGGAGACTG
TCTGGGAGACATTGCTGCCAGGGACCTGATTTGTGCCCAGAAGTTCAACGGACTGACAGTGCTGCCTC
CACTGCTGACAGATGAGATGATTGCCCAATACACCTCTGCCCTGCTGGCTGGCACCATCACCTCTGGC
TGGACCTTTGGAGCAGGACCAGCCCTCCAAATCCCATTTCCAATGCAGATGGCTTACAGGTTCAATGG
CATTGGAGTGACCCAGAATGTGCTCTATGAGAACCAGAAACTGATTGCCAACCAGTTCAACTCTGCCA
TTGGCAAGATTCAGGACTCCCTGTCCAGCACACCATCTGCCCTGGGCAAGCTCCAAGATGTGGTGAAC
CAcAATGCCCAGGCTCTGAACACCCTGGTGAAGCAACTTTCCAGCAAgTTTGGAGCCATCTCCTCTGT
GCTGAATGACATCCTGAGCAGACTGGACCCACCAGAGGCTGAGGTCCAGATTGACAGACTGATTACAG
GCAGACTCCAATCCCTCCAAACCTATGTGACCCAACAACTTATCAGGGCTGCTGAGATTAGGGCATCT
GCCAACCTGGCTGCCACCAAGATGAGTGAGTGTGTGCTGGGACAAAGCAAGAGGGTGGACTTCTGTGG
CAAGGGCTACCACCTGATGAGTTTTCCACAGTCTGCCCCTCATGGAGTGGTGTTCCTGCATGTGACCT
ATGTGCCTGCCCAGGAGAAGAACTTCACCACAGCCCCTGCCATCTGCCATGATGGCAAGGCTCACTTT
CCAAGGGAGGGAGTGTTTGTGAGCAATGGCACCCACTGGTTTGTGACCCAGAGGAACTTCTATGAACC
ACAGATTATCACCACAGACAACACCTTTGTGTCTGGCAACTGTGATGTGGTGATTGGCATTGTGAACA
ACACAGTCTATGACCCACTCCAACCTGAACTGGACTCCTTCAAGGAGGAACTGGACAAATACTTCAAG
AACCACACCAGCCCTGATGTGGACCTGGGAGACATCTCTGGCATCAATGCCTCTGTGGTGAACATCCA
GAAGGAGATTGACAGACTGAATGAGGTGGCTAAGAACCTGAATGAGTCCCTGATTGACCTCCAAGAAC
TGGGCAAATATGAACAATACATCAAGTGGCCATGGTACATCTGGCTGGGCTTCATTGCTGGACTGATT
GCCATTGTGATGGTGACCATAATGCTGTGTTGTATGACCTCCTGTTGTTCCTGTCTGAAAGGCTGTTG
TTCCTGTGGCTCCTGTTGTAAGTTTGATGAGGATGACTCTGAACCTGTGCTGAAAGGAGTGAAACTGC
ACTACACCTGACTCGAGCTGGTACTGCATGCACGCAATGCTAGCTGCCCCTTTCCCGTCCTGGGTACC
CCGAGTCTCCCCCGACCTCGGGTCCCAGGTATGCTCCCACCTCCACCTGCCCCACTCACCACCTCTGC
TAGTTCCAGACACCTCCCAAGCACGCAGCAATGCAGCTCAAAACGCTTAGCCTAGCCACACCCCCACG
GGAAACAGCAGTGATTAACCTTTAGCAATAAACGAAAGTTTAACTAAGCTATACTAACCCCAGGGTTG
GTCAATTTCGTGCCAGCCACACCCTGGAGCTAGCaaaccgctgatcagcctcgactgtgccttctagt
tgccagccatctgttgtttgcccctcccccgtgccttccttgaccctggaaggtgccactcccactgt
cctttcctaataaaatgaggaaattgcatcgcattgtctgagtaggtgtcattctattctggggggtg
gggtggggcaggacagcaagggggaggattgggaagacaatagcaggcatgctggggatgcggtgggc
tctatggcttctgaggcggaaagaaccagctggggctctagggggtatccccacgcgccctgtagcgg
cgcattaagcgcggcgggtgtggtggttacgcgcagcgtgaccgctacacttgccagcgccctagcgc
ccgctcctttcgctttcttcccttcctttctcgccacgttcgccggctttccccgtcaagctctaaat
cgggggctccctttagggttccgatttagtgctttacggcacctcgaccccaaaaaacttgattaggg
tgatggttcacgtagtgggccatcgccctgatagacggtttttcgccctttgacgttggagtccacgt
tctttaatagtggactcttgttccaaactggaacaacactcaaccctatctcggtctattcttttgat
ttataagggattttgccgatttcggcctattggttaaaaaatgagctgatttaacaaaaatttaacgc
gaattaattctgtggaatgtgtgtcagttagggtgtggaaagtccccaggctccccagcaggcagaag
tatgcaaagcatgcatctcaattagtcagcaaccaggtgtggaaagtccccaggctccccagcaggca
gaagtatgcaaagcatgcatctcaattagtcagcaaccatagtcccgcccctaactccgcccatcccg
cccctaactccgcccagttccgcccattctccgccccatggctgactaattttttttatttatgcaga
ggccgaggccgcctctgcctctgagctattccagaagtagtgaggaggcttttttggaggcctaggct
tttgcaaaaagctcccgggagcttgtatatccattttcggatctgatcaagagacaggatgaggatcg
tttcgcatgattgaacaagatggattgcacgcaggttctccggccgcttgggtggagaggctattcgg
ctatgactgggcacaacagacaatcggctgctctgatgccgccgtgttccggctgtcagcgcaggggc
gcccggttctttttgtcaagaccgacctgtccggtgccctgaatgaactgcaggacgaggcagcgcgg
ctatcgtggctggccacgacgggcgttccttgcgcagctgtgctcgacgttgtcactgaagcgggaag
ggactggctgctattgggcgaagtgccggggcaggatctcctgtcatctcaccttgctcctgccgaga
aagtatccatcatggctgatgcaatgcggcggctgcatacgcttgatccggctacctgcccattcgac
caccaagcgaaacatcgcatcgagcgagcacgtactcggatggaagccggtcttgtcgatcaggatga
tctggacgaagagcatcaggggctcgcgccagccgaactgttcgccaggctcaaggcgcgcatgcccg
acggcgaggatctcgtcgtgacccatggcgatgcctgcttgccgaatatcatggtggaaaatggccgc
ttttctggattcatcgactgtggccggctgggtgtggcggaccgctatcaggacatagcgttggctac
ccgtgatattgctgaagagcttggcggcgaatgggctgaccgcttcctcgtgctttacggtatcgccg
ctcccgattcgcagcgcatcgccttctatcgccttcttgacgagttcttctgagcgggactctggggt
tcgaaatgaccgaccaagcgacgcccaacctgccatcacgagatttcgattccaccgccgccttctat
gaaaggttgggcttcggaatcgttttccgggacgccggctggatgatcctccagcgcggggatctcat
gctggagttcttcgcccaccccaacttgtttattgcagcttataatggttacaaataaagcaatagca
tcacaaatttcacaaataaagcatttttttcactgcattctagttgtggtttgtccaaactcatcaat
gtatcttatcatgtctgtataccgtcgacctctagctagagcttggcgtaatcatggtcatagctgtt
tcctgtgtgaaattgttatccgctcacaattccacacaacatacgagccggaagcataaagtgtaaag
cctggggtgcctaatgagtgagctaactcacattaattgcgttgcgctcactgcccgctttccagtcg
ggaaacctgtcgtgccagctgcattaatgaatcggccaacgcgcggggagaggcggtttgcgtattgg
gcgctcttccgcttcctcgctcactgactcgctgcgctcggtcgttcggctgcggcgagcggtatcag
ctcactcaaaggcggtaatacggttatccacagaatcaggggataacgcaggaaagaacatgtgagca
aaaggccagcaaaaggccaggaaccgtaaaaaggccgcgttgctggcgtttttccataggctccgccc
ccctgacgagcatcacaaaaatcgacgctcaagtcagaggtggcgaaacccgacaggactataaagat
accaggcgtttccccctggaagctccctcgtgcgctctcctgttccgaccctgccgcttaccggatac
ctgtccgcctttctcccttcgggaagcgtggcgctttctcatagctcacgctgtaggtatctcagttc
ggtgtaggtcgttcgctccaagctgggctgtgtgcacgaaccccccgttcagcccgaccgctgcgcct
tatccggtaactatcgtcttgagtccaacccggtaagacacgacttatcgccactggcagcagccact
ggtaacaggattagcagagcgaggtatgtaggcggtgctacagagttcttgaagtggtggcctaacta
cggctacactagaagaacagtatttggtatctgcgctctgctgaagccagttaccttcggaaaaagag
ttggtagctcttgatccggcaaacaaaccaccgctggtagcggtggtttttttgtttgcaagcagcag
attacgcgcagaaaaaaaggatctcaagaagatcctttgatcttttctacggggtctgacgctcagtg
gaacgaaaactcacgttaagggattttggtcatgagattatcaaaaaggatcttcacctagatccttt
taaattaaaaatgaagttttaaatcaatctaaagtatatatgagtaaacttggtctgacagttaccaa
tgcttaatcagtgaggcacctatctcagcgatctgtctatttcgttcatccatagttgcctgactccc
cgtcgtgtagataactacgatacgggagggcttaccatctggccccagtgctgcaatgataccgcgag
acccacgctcaccggctccagatttatcagcaataaaccagccagccggaagggccgagcgcagaagt
ggtcctgcaactttatccgcctccatccagtctattaattgttgccgggaagctagagtaagtagttc
gccagttaatagtttgcgcaacgttgttgccattgctacaggcatcgtggtgtcacgctcgtcgtttg
gtatggcttcattcagctccggttcccaacgatcaaggcgagttacatgatcccccatgttgtgcaaa
aaagcggttagctccttcggtcctccgatcgttgtcagaagtaagttggccgcagtgttatcactcat
ggttatggcagcactgcataattctcttactgtcatgccatccgtaagatgcttttctgtgactggtg
agtactcaaccaagtcattctgagaatagtgtatgcggcgaccgagttgctcttgcccggcgtcaata
cgggataataccgcgccacatagcagaactttaaaagtgctcatcattggaaaacgttcttcggggcg
aaaactctcaaggatcttaccgctgttgagatccagttcgatgtaacccactcgtgcacccaactgat
cttcagcatcttttactttcaccagcgtttctgggtgagcaaaaacaggaaggcaaaatgccgcaaaa
aagggaataagggcgacacggaaatgttgaatactcatactcttcctttttcaatattattgaagcat
ttatcagggttattgtctcatgagcggatacatatttgaatgtatttagaaaaataaacaaatagggg
ttccgcgcacatttccccgaaaagtgccacctgacgtc
Omicron BA.2 Spike Hexapro
(SEQ ID NO: 34)
MFVFLVLLPLVSSQCVNLITRTQSYTNSFTRGVYYPDKVFRSSVLHSTQDLFLPFFSNVTWFHAIHVS
GTNGTKRFDNPVLPFNDGVYFASTEKSNIIRGWIFGTTLDSKTQSLLIVNNATNVVIKVCEFQFCNDP
FLDVYYHKNNKSWMESEFRVYSSANNCTFEYVSQPFLMDLEGKQGNFKNLREFVFKNIDGYFKIYSKH
TPINLGRDLPQGFSALEPLVDLPIGINITRFQTLLALHRSYLTPGDSSSGWTAGAAAYYVGYLQPRTF
LLKYNENGTITDAVDCALDPLSETKCTLKSFTVEKGIYQTSNFRVQPTESIVRFPNITNLCPFDEVFN
ATRFASVYAWNRKRISNCVADYSVLYNFAPFFAFKCYGVSPTKLNDLCFTNVYADSFVIRGNEVSQIA
PGQTGNIADYNYKLPDDFTGCVIAWNSNKLDSKVGGNYNYLYRLFRKSNLKPFERDISTEIYQAGNKP
CNGVAGFNCYFPLRSYGFRPTYGVGHQPYRVVVLSFELLHAPATVCGPKKSTNLVKNKCVNFNFNGLT
GTGVLTESNKKFLPFQQFGRDIADTTDAVRDPQTLEILDITPCSFGGVSVITPGTNTSNQVAVLYQGV
NCTEVPVAIHADQLTPTWRVYSTGSNVFQTRAGCLIGAEYVNNSYECDIPIGAGICASYQTQTKSHRR
ARSVASQSIIAYTMSLGAENSVAYSNNSIAIPTNFTISVTTEILPVSMTKTSVDCTMYICGDSTECSN
LLLQYGSFCTQLKRALTGIAVEQDKNTQEVFAQVKQIYKTPPIKYFGGFNFSQILPDPSKPSKRSPIE
DLLFNKVTLADAGFIKQYGDCLGDIAARDLICAQKFNGLTVLPPLLTDEMIAQYTSALLAGTITSGWT
FGAGPALQIPFPMQMAYRFNGIGVTQNVLYENQKLIANQFNSAIGKIQDSLSSTPSALGKLQDVVNHN
AQALNTLVKQLSSKFGAISSVLNDILSRLDPPEAEVQIDRLITGRLQSLQTYVTQQLIRAAEIRASAN
LAATKMSECVLGQSKRVDFCGKGYHLMSFPQSAPHGVVFLHVTYVPAQEKNFTTAPAICHDGKAHFPR
EGVFVSNGTHWFVTQRNFYEPQIITTDNTFVSGNCDVVIGIVNNTVYDPLQPELDSFKEELDKYFKNH
TSPDVDLGDISGINASVVNIQKEIDRLNEVAKNLNESLIDLQELGKYEQYIKWPWYIWLGFIAGLIAI
VMVTIMLCCMTSCCSCLKGCCSCGSCCKFDEDDSEPVLKGVKLHYT*
pZF57 Omicron BA.2 Spike Pseudovirus del 19
(SEQ ID NO: 35)
gacggatcgggagatctcccgatcccctatggtgcactctcagtacaatctgctctgatgccgcatag
ttaagccagtatctgctccctgcttgtgtgttggaggtcgctgagtagtgcgcgagcaaaatttaagc
tacaacaaggcaaggcttgaccgacaattgcatgaagaatctgcttagggttaggcgttttgcgctgc
ttcgcgatgtacgggccagatatacgcgttgacattgattattgactagttattaatagtaatcaatt
acggggtcattagttcatagcccatatatggagttccgcgttacataacttacggtaaatggcccgcc
tggctgaccgcccaacgacccccgcccattgacgtcaataatgacgtatgttcccatagtaacgccaa
tagggactttccattgacgtcaatgggtggagtatttacggtaaactgcccacttggcagtacatcaa
gtgtatcatatgccaagtacgccccctattgacgtcaatgacggtaaatggcccgcctggcattatgc
ccagtacatgaccttatgggactttcctacttggcagtacatctacgtattagtcatcgctattacca
tggtgatgcggttttggcagtacatcaatgggcgtggatagcggtttgactcacggggatttccaagt
ctccaccccattgacgtcaatgggagtttgttttggcaccaaaatcaacgggactttccaaaatgtcg
taacaactccgccccattgacgcaaatgggcggtaggcgtgtacggtgggaggtctatataagcagag
ctctctggctaactagagaacccactgcttactggcttatcgaaattaatacgactcactatagggag
acccaagctggctagccaccATgTTTGTGTTCCTGGTGCTGCTGCCACTGGTGTCCAGCCAGTGTGTG
AACCTGATCACCAGGACCCAAAGCTACACCAACTCCTTCACCAGGGGAGTCTACTACCCTGACAAGGT
GTTCAGGTCCTCTGTGCTGCACAGCACCCAGGACCTGTTCCTGCCATTCTTCAGCAATGTGACCTGGT
TCCATGCCATCCACGTGTCTGGCACCAATGGCACCAAGAGGTTTGACAACCCTGTGCTGCCATTCAAT
GATGGAGTCTACTTTGCCAGCACCGAGAAGAGCAACATCATCAGGGGCTGGATTTTTGGCACCACCCT
GGACAGCAAGACCCAGTCCCTGCTGATTGTGAACAATGCCACCAATGTGGTGATTAAGGTGTGTGAGT
TCCAGTTCTGTAATGACCCATTCCTGGacGTGTACTACCACAAGAACAACAAGTCCTGGATGGAGTCT
GAGTTCAGGGTCTACTCCTCTGCCAACAACTGTACCTTTGAATATGTGAGCCAACCATTCCTGATGGA
CTTGGAGGGCAAGCAGGGCAACTTCAAGAACCTGAGGGAGTTTGTGTTCAAGAACATTGATGGCTACT
TCAAGATTTACAGCAAACACACACCAATCAACCTGGGCAGAGACCTGCCACAGGGCTTCTCTGCCTTG
GAACCACTGGTGGACCTGCCAATTGGCATCAACATCACCAGGTTCCAGACCCTGCTGGCTCTGCACAG
GTCCTACCTGACACCTGGAGACTCCTCCTCTGGCTGGACAGCAGGAGCAGCAGCCTACTATGTGGGCT
ACCTCCAACCAAGGACCTTCCTGCTGAAATACAATGAGAATGGCACCATCACAGATGCTGTGGACTGT
GCCCTGGACCCACTGTCTGAGACCAAGTGTACCCTGAAATCCTTCACAGTGGAGAAGGGCATCTACCA
GACCAGCAACTTCAGGGTCCAACCAACAGAGAGCATTGTGAGGTTTCCAAACATCACCAACCTGTGTC
CATTTGacGAGGTGTTCAAcGCCACCAGGTTTGCCTCTGTCTATGCCTGGAACAGGAAGAGGATTAGC
AACTGTGTGGCTGACTACTCTGTGCTCTACAACTTCGCCcCCTTCttCGCCTTCAAGTGTTATGGAGT
GAGCCCAACCAAACTGAATGACCTGTGTTTCACCAATGTCTATGCTGACTCCTTTGTGATTAGGGGAA
ACGAGGTGAGCCAGATTGCCCCTGGACAAACAGGCAAcATTGCTGACTACAACTACAAACTGCCTGAT
GACTTCACAGGCTGTGTGATTGCCTGGAACAGCAACAAgCTGGACAGCAAGGTGGGCGGCAACTACAA
CTACCTCTACAGACTGTTCAGGAAGAGCAACCTGAAACCATTTGAGAGGGACATCAGCACAGAGATTT
ACCAGGCTGGCAaCAagCCATGTAATGGAGTGGccGGCTTCAACTGTTACTTTCCACTCCggTCCTAT
GGCTTCCggCCAACCtacGGAGTGGGCcACCAACCATACAGGGTGGTGGTGCTGTCCTTTGAACTGCT
CCATGCCCCTGCCACAGTGTGTGGACCAAAGAAGAGCACCAACCTGGTGAAGAACAAGTGTGTGAACT
TCAACTTCAATGGACTGACCGGCACAGGAGTGCTGACAGAGAGCAACAAGAAGTTCCTGCCATTCCAA
CAGTTTGGCAGGGACATTGCTGACACCACAGATGCTGTGAGGGACCCACAGACCTTGGAGATTCTGGA
CATCACACCATGTTCCTTTGGAGGAGTGTCTGTGATTACACCTGGCACCAACACCAGCAACCAGGTGG
CTGTGCTCTACCAGGgcGTGAACTGTACTGAGGTGCCTGTGGCTATCCATGCTGACCAACTTACACCA
ACCTGGAGGGTCTACAGCACAGGCAGCAATGTGTTCCAGACCAGGGCTGGCTGTCTGATTGGAGCAGA
GtacGTGAACAACTCCTATGAGTGTGACATCCCAATTGGAGCAGGCATCTGTGCCTCCTACCAGACCC
AGACCAAgAGCCacAGGAGGGCAAGGTCTGTGGCAAGCCAGAGCATCATTGCCTACACAATGAGTCTG
GGAGCAGAGAACTCTGTGGCTTACAGCAACAACAGCATTGCCATCCCAACCAACTTCACCATCTCTGT
GACCACAGAGATTCTGCCTGTGAGTATGACCAAGACCTCTGTGGACTGTACAATGTATATCTGTGGAG
ACAGCACAGAGTGTAGCAACCTGCTGCTCCAATATGGCTCCTTCTGTACCCAACTTAAgAGGGCTCTG
ACAGGCATTGCTGTGGAACAGGACAAGAACACCCAGGAGGTGTTTGCCCAGGTGAAGCAGATTTACAA
GACACCTCCAATCAAGtACTTTGGAGGCTTCAACTTCAGCCAGATTCTGCCTGACCCAAGCAAGCCAA
GCAAGAGGTCCTTCATTGAGGACCTGCTGTTCAACAAGGTGACCCTGGCTGATGCTGGCTTCATCAAG
CAATATGGAGACTGTCTGGGAGACATTGCTGCCAGGGACCTGATTTGTGCCCAGAAGTTCAACGGACT
GACAGTGCTGCCTCCACTGCTGACAGATGAGATGATTGCCCAATACACCTCTGCCCTGCTGGCTGGCA
CCATCACCTCTGGCTGGACCTTTGGAGCAGGAGCAGCCCTCCAAATCCCATTTGCTATGCAGATGGCT
TACAGGTTCAATGGCATTGGAGTGACCCAGAATGTGCTCTATGAGAACCAGAAACTGATTGCCAACCA
GTTCAACTCTGCCATTGGCAAGATTCAGGACTCCCTGTCCAGCACAGCCTCTGCCCTGGGCAAGCTCC
AAGATGTGGTGAACCACAATGCCCAGGCTCTGAACACCCTGGTGAAGCAACTTTCCAGCAAgTTTGGA
GCCATCTCCTCTGTGCTGAATGACATCCTGAGCAGACTGGACAAGGTGGAGGCTGAGGTCCAGATTGA
CAGACTGATTACAGGCAGACTCCAATCCCTCCAAACCTATGTGACCCAACAACTTATCAGGGCTGCTG
AGATTAGGGCATCTGCCAACCTGGCTGCCACCAAGATGAGTGAGTGTGTGCTGGGACAAAGCAAGAGG
GTGGACTTCTGTGGCAAGGGCTACCACCTGATGAGTTTTCCACAGTCTGCCCCTCATGGAGTGGTGTT
CCTGCATGTGACCTATGTGCCTGCCCAGGAGAAGAACTTCACCACAGCCCCTGCCATCTGCCATGATG
GCAAGGCTCACTTTCCAAGGGAGGGAGTGTTTGTGAGCAATGGCACCCACTGGTTTGTGACCCAGAGG
AACTTCTATGAACCACAGATTATCACCACAGACAACACCTTTGTGTCTGGCAACTGTGATGTGGTGAT
TGGCATTGTGAACAACACAGTCTATGACCCACTCCAACCTGAACTGGACTCCTTCAAGGAGGAACTGG
ACAAATACTTCAAGAACCACACCAGCCCTGATGTGGACCTGGGAGACATCTCTGGCATCAATGCCTCT
GTGGTGAACATCCAGAAGGAGATTGACAGACTGAATGAGGTGGCTAAGAACCTGAATGAGTCCCTGAT
TGACCTCCAAGAACTGGGCAAATATGAACAATACATCAAGTGGCCATGGTACATCTGGCTGGGCTTCA
TTGCTGGACTGATTGCCATTGTGATGGTGACCATAATGCTGTGTTGTATGACCTCCTGTTGTTCCTGT
CTGAAAGGCTGTTGTTCCTGTGGCTCCTGTTGTTGAggatccgagctcggtaccaagcttaagtttaa
accgctgatcagcctcgactgtgccttctagttgccagccatctgttgtttgcccctcccccgtgcct
tccttgaccctggaaggtgccactcccactgtcctttcctaataaaatgaggaaattgcatcgcattg
tctgagtaggtgtcattctattctggggggtggggtggggcaggacagcaagggggaggattgggaag
acaatagcaggcatgctggggatgcggtgggctctatggcttctgaggcggaaagaaccagctggggc
tctagggggtatccccacgcgccctgtagcggcgcattaagcgcggcgggtgtggtggttacgcgcag
cgtgaccgctacacttgccagcgccctagcgcccgctcctttcgctttcttcccttcctttctcgcca
cgttcgccggctttccccgtcaagctctaaatcgggggctccctttagggttccgatttagtgcttta
cggcacctcgaccccaaaaaacttgattagggtgatggttcacgtagtgggccatcgccctgatagac
ggtttttcgccctttgacgttggagtccacgttctttaatagtggactcttgttccaaactggaacaa
cactcaaccctatctcggtctattcttttgatttataagggattttgccgatttcggcctattggtta
aaaaatgagctgatttaacaaaaatttaacgcgaattaattctgtggaatgtgtgtcagttagggtgt
ggaaagtccccaggctccccagcaggcagaagtatgcaaagcatgcatctcaattagtcagcaaccag
gtgtggaaagtccccaggctccccagcaggcagaagtatgcaaagcatgcatctcaattagtcagcaa
ccatagtcccgcccctaactccgcccatcccgcccctaactccgcccagttccgcccattctccgccc
catggctgactaattttttttatttatgcagaggccgaggccgcctctgcctctgagctattccagaa
gtagtgaggaggcttttttggaggcctaggcttttgcaaaaagctcccgggagcttgtatatccattt
tcggatctgatcaagagacaggatgaggatcgtttcgcatgattgaacaagatggattgcacgcaggt
tctccggccgcttgggtggagaggctattcggctatgactgggcacaacagacaatcggctgctctga
tgccgccgtgttccggctgtcagcgcaggggcgcccggttctttttgtcaagaccgacctgtccggtg
ccctgaatgaactgcaggacgaggcagcgcggctatcgtggctggccacgacgggcgttccttgcgca
gctgtgctcgacgttgtcactgaagcgggaagggactggctgctattgggcgaagtgccggggcagga
tctcctgtcatctcaccttgctcctgccgagaaagtatccatcatggctgatgcaatgcggcggctgc
atacgcttgatccggctacctgcccattcgaccaccaagcgaaacatcgcatcgagcgagcacgtact
cggatggaagccggtcttgtcgatcaggatgatctggacgaagagcatcaggggctcgcgccagccga
actgttcgccaggctcaaggcgcgcatgcccgacggcgaggatctcgtcgtgacccatggcgatgcct
gcttgccgaatatcatggtggaaaatggccgcttttctggattcatcgactgtggccggctgggtgtg
gcggaccgctatcaggacatagcgttggctacccgtgatattgctgaagagcttggcggcgaatgggc
tgaccgcttcctcgtgctttacggtatcgccgctcccgattcgcagcgcatcgccttctatcgccttc
ttgacgagttcttctgagcgggactctggggttcgaaatgaccgaccaagcgacgcccaacctgccat
cacgagatttcgattccaccgccgccttctatgaaaggttgggcttcggaatcgttttccgggacgcc
ggctggatgatcctccagcgcggggatctcatgctggagttcttcgcccaccccaacttgtttattgc
agcttataatggttacaaataaagcaatagcatcacaaatttcacaaataaagcatttttttcactgc
attctagttgtggtttgtccaaactcatcaatgtatcttatcatgtctgtataccgtcgacctctagc
tagagcttggcgtaatcatggtcatagctgtttcctgtgtgaaattgttatccgctcacaattccaca
caacatacgagccggaagcataaagtgtaaagcctggggtgcctaatgagtgagctaactcacattaa
ttgcgttgcgctcactgcccgctttccagtcgggaaacctgtcgtgccagctgcattaatgaatcggc
caacgcgcggggagaggcggtttgcgtattgggcgctcttccgcttcctcgctcactgactcgctgcg
ctcggtcgttcggctgcggcgagcggtatcagctcactcaaaggcggtaatacggttatccacagaat
caggggataacgcaggaaagaacatgtgagcaaaaggccagcaaaaggccaggaaccgtaaaaaggcc
gcgttgctggcgtttttccataggctccgcccccctgacgagcatcacaaaaatcgacgctcaagtca
gaggtggcgaaacccgacaggactataaagataccaggcgtttccccctggaagctccctcgtgcgct
ctcctgttccgaccctgccgcttaccggatacctgtccgcctttctcccttcgggaagcgtggcgctt
tctcatagctcacgctgtaggtatctcagttcggtgtaggtcgttcgctccaagctgggctgtgtgca
cgaaccccccgttcagcccgaccgctgcgccttatccggtaactatcgtcttgagtccaacccggtaa
gacacgacttatcgccactggcagcagccactggtaacaggattagcagagcgaggtatgtaggcggt
gctacagagttcttgaagtggtggcctaactacggctacactagaagaacagtatttggtatctgcgc
tctgctgaagccagttaccttcggaaaaagagttggtagctcttgatccggcaaacaaaccaccgctg
gtagcggtggtttttttgtttgcaagcagcagattacgcgcagaaaaaaaggatctcaagaagatcct
ttgatcttttctacggggtctgacgctcagtggaacgaaaactcacgttaagggattttggtcatgag
attatcaaaaaggatcttcacctagatccttttaaattaaaaatgaagttttaaatcaatctaaagta
tatatgagtaaacttggtctgacagttaccaatgcttaatcagtgaggcacctatctcagcgatctgt
ctatttcgttcatccatagttgcctgactccccgtcgtgtagataactacgatacgggagggcttacc
atctggccccagtgctgcaatgataccgcgagacccacgctcaccggctccagatttatcagcaataa
accagccagccggaagggccgagcgcagaagtggtcctgcaactttatccgcctccatccagtctatt
aattgttgccgggaagctagagtaagtagttcgccagttaatagtttgcgcaacgttgttgccattgc
tacaggcatcgtggtgtcacgctcgtcgtttggtatggcttcattcagctccggttcccaacgatcaa
ggcgagttacatgatcccccatgttgtgcaaaaaagcggttagctccttcggtcctccgatcgttgtc
agaagtaagttggccgcagtgttatcactcatggttatggcagcactgcataattctcttactgtcat
gccatccgtaagatgcttttctgtgactggtgagtactcaaccaagtcattctgagaatagtgtatgc
ggcgaccgagttgctcttgcccggcgtcaatacgggataataccgcgccacatagcagaactttaaaa
gtgctcatcattggaaaacgttcttcggggcgaaaactctcaaggatcttaccgctgttgagatccag
ttcgatgtaacccactcgtgcacccaactgatcttcagcatcttttactttcaccagcgtttctgggt
gagcaaaaacaggaaggcaaaatgccgcaaaaaagggaataagggcgacacggaaatgttgaatactc
atactcttcctttttcaatattattgaagcatttatcagggttattgtctcatgagcggatacatatt
tgaatgtatttagaaaaataaacaaataggggttccgcgcacatttccccgaaaagtgccacctgacg
tc
Omicron Spike Del-19 (pZF47)
(SEQ ID NO: 57)
MFVFLVLLPLVSSQCVNLTTRTQLPPAYTNSFTRGVYYPDKVFRSSVLHSTQDLFLPFFSNVTWFHVI
SGTNGTKRFDNPVLPFNDGVYFASIEKSNIIRGWIFGTTLDSKTQSLLIVNNATNVVIKVCEFQFCND
PFLDHKNNKSWMESEFRVYSSANNCTFEYVSQPFLMDLEGKQGNFKNLREFVFKNIDGYFKIYSKHTP
IIVREPEDLPQGFSALEPLVDLPIGINITRFQTLLALHRSYLTPGDSSSGWTAGAAAYYVGYLQPRTF
LLKYNENGTITDAVDCALDPLSETKCTLKSFTVEKGIYQTSNFRVQPTESIVRFPNITNLCPFDEVFN
ATRFASVYAWNRKRISNCVADYSVLYNLAPFFTFKCYGVSPTKLNDLCFTNVYADSFVIRGDEVRQIA
PGQTGNIADYNYKLPDDFTGCVIAWNSNKLDSKVSGNYNYLYRLFRKSNLKPFERDISTEIYQAGNKP
CNGVAGFNCYFPLRSYSFRPTYGVGHQPYRVVVLSFELLHAPATVCGPKKSTNLVKNKCVNFNFNGLK
GTGVLTESNKKFLPFQQFGRDIADTTDAVRDPQTLEILDITPCSFGGVSVITPGTNTSNQVAVLYQGV
NCTEVPVAIHADQLTPTWRVYSTGSNVFQTRAGCLIGAEYVNNSYECDIPIGAGICASYQTQTKSHRR
ARSVASQSIIAYTMSLGAENSVAYSNNSIAIPTNFTISVTTEILPVSMTKTSVDCTMYICGDSTECSN
LLLQYGSFCTQLKRALTGIAVEQDKNTQEVFAQVKQIYKTPPIKYFGGFNFSQILPDPSKPSKRSFIE
DLLFNKVTLADAGFIKQYGDCLGDIAARDLICAQKFKGLTVLPPLLTDEMIAQYTSALLAGTITSGWT
FGAGAALQIPFAMQMAYRFNGIGVTQNVLYENQKLIANQFNSAIGKIQDSLSSTASALGKLQDVVNHN
AQALNTLVKQLSSKFGAISSVLNDIFSRLDKVEAEVQIDRLITGRLQSLQTYVTQQLIRAAEIRASAN
LAATKMSECVLGQSKRVDFCGKGYHLMSFPQSAPHGVVFLHVTYVPAQEKNFTTAPAICHDGKAHFPR
EGVFVSNGTHWFVTQRNFYEPQIITTDNTFVSGNCDVVIGIVNNTVYDPLQPELDSFKEELDKYFKNH
TSPDVDLGDISGINASVVNIQKEIDRLNEVAKNLNESLIDLQELGKYEQYIKWPWYIWLGFIAGLIAI
VMVTIMLCCMTSCCSCLKGCCSCGSCC*
Omicron BA.2.12.1 Spike Del-19 (pZF89)
(SEQ ID NO: 58)
MFVFLVLLPLVSSQCVNLITRTQSYTNSFTRGVYYPDKVFRSSVLHSTQDLFLPFFSNVTWFHAIHVS
GTNGTKRFDNPVLPFNDGVYFASTEKSNIIRGWIFGTTLDSKTQSLLIVNNATNVVIKVCEFQFCNDP
FLDVYYHKNNKSWMESEFRVYSSANNCTFEYVSQPFLMDLEGKQGNFKNLREFVFKNIDGYFKIYSKH
TPINLGRDLPQGFSALEPLVDLPIGINITRFQTLLALHRSYLTPGDSSSGWTAGAAAYYVGYLQPRTF
LLKYNENGTITDAVDCALDPLSETKCTLKSFTVEKGIYQTSNFRVQPTESIVRFPNITNLCPFDEVFN
ATRFASVYAWNRKRISNCVADYSVLYNFAPFFAFKCYGVSPTKLNDLCFTNVYADSFVIRGNEVSQIA
PGQTGNIADYNYKLPDDFTGCVIAWNSNKLDSKVGGNYNYQYRLFRKSNLKPFERDISTEIYQAGNKP
CNGVAGFNCYFPLRSYGFRPTYGVGHQPYRVVVLSFELLHAPATVCGPKKSTNLVKNKCVNFNFNGLT
GTGVLTESNKKFLPFQQFGRDIADTTDAVRDPQTLEILDITPCSFGGVSVITPGTNTSNQVAVLYQGV
NCTEVPVAIHADQLTPTWRVYSTGSNVFQTRAGCLIGAEYVNNSYECDIPIGAGICASYQTQTKSHRR
ARSVASQSIIAYTMSLGAENLVAYSNNSIAIPTNFTISVTTEILPVSMTKTSVDCTMYICGDSTECSN
LLLQYGSFCTQLKRALTGIAVEQDKNTQEVFAQVKQIYKTPPIKYFGGFNFSQILPDPSKPSKRSFIE
DLLFNKVTLADAGFIKQYGDCLGDIAARDLICAQKFNGLTVLPPLLTDEMIAQYTSALLAGTITSGWT
FGAGAALQIPFAMQMAYRFNGIGVTQNVLYENQKLIANQFNSAIGKIQDSLSSTASALGKLQDVVNHN
AQALNTLVKQLSSKFGAISSVLNDILSRLDKVEAEVQIDRLITGRLQSLQTYVTQQLIRAAEIRASAN
LAATKMSECVLGQSKRVDFCGKGYHLMSFPQSAPHGVVFLHVTYVPAQEKNFTTAPAICHDGKAHFPR
EGVFVSNGTHWFVTQRNFYEPQIITTDNTFVSGNCDVVIGIVNNTVYDPLQPELDSFKEELDKYFKNH
TSPDVDLGDISGINASVVNIQKEIDRLNEVAKNLNESLIDLQELGKYEQYIKWPWYIWLGFIAGLIAI
VMVTIMLCCMTSCCSCLKGCCSCGSCC*
Omicron BA.4 Spike Del-19 (pZF90)
(SEQ ID NO: 59)
MFVFLVLLPLVSSQCVNLITRTQSYTNSFTRGVYYPDKVFRSSVLHSTQDLFLPFFSNVTWFHAISGT
NGTKRFDNPVLPFNDGVYFASTEKSNIIRGWIFGTTLDSKTQSLLIVNNATNVVIKVCEFQFCNDPFL
DVYYHKNNKSWMESEFRVYSSANNCTFEYVSQPFLMDLEGKQGNFKNLREFVFKNIDGYFKIYSKHTP
INLGRDLPQGFSALEPLVDLPIGINITRFQTLLALHRSYLTPGDSSSGWTAGAAAYYVGYLQPRTFLL
KYNENGTITDAVDCALDPLSETKCTLKSFTVEKGIYQTSNFRVQPTESIVRFPNITNLCPFDEVFNAT
RFASVYAWNRKRISNCVADYSVLYNFAPFFAFKCYGVSPTKLNDLCFTNVYADSFVIRGNEVSQIAPG
QTGNIADYNYKLPDDFTGCVIAWNSNKLDSKVGGNYNYRYRLFRKSNLKPFERDISTEIYQAGNKPCN
GVAGVNCYFPLQSYGFRPTYGVGHQPYRVVVLSFELLHAPATVCGPKKSTNLVKNKCVNFNFNGLTGT
GVLTESNKKFLPFQQFGRDIADTTDAVRDPQTLEILDITPCSFGGVSVITPGTNTSNQVAVLYQGVNC
TEVPVAIHADQLTPTWRVYSTGSNVFQTRAGCLIGAEYVNSSYECDIPIGAGICASYQTQTKSHRRAR
SVASQSIIAYTMSLGAENSVAYSNNSIAIPTNFTISVTTEILPVSMTKTSVDCTMYICGDSTECSNLL
LQYGSFCTQLKRALTGIAVEQDKNTQEVFAQVKQIYKTPPIKYFGGFNFSQILPDPSKPSKRSFIEDL
LFNKVTLADAGFIKQYGDCLGDIAARDLICAQKFNGLTVLPPLLTDEMIAQYTSALLAGTITSGWTFG
AGAALQIPFAMQMAYRFNGIGVTQNVLYENQKLIANQFNSAIGKIQDSLSSTASALGKLQDVVNHNAQ
ALNTLVKQLSSKFGAISSVLNDILSRLDKVEAEVQIDRLITGRLQSLQTYVTQQLIRAAEIRASANLA
ATKMSECVLGQSKRVDFCGKGYHLMSFPQSAPHGVVFLHVTYVPAQEKNFTTAPAICHDGKAHFPREG
VFVSNGTHWFVTQRNFYEPQIITTDNTFVSGNCDVVIGIVNNTVYDPLQPELDSFKEELDKYFKNHTS
PDVDLGDISGINASVVNIQKEIDRLNEVAKNLNESLIDLQELGKYEQYIKWPWYIWLGFIAGLIAIVM
VTIMLCCMTSCCSCLKGCCSCGSCC*
Omicron BA.2 Spike Del-19 (pZF57)
(SEQ ID NO: 60)
MFVFLVLLPLVSSQCVNLITRTQSYTNSFTRGVYYPDKVFRSSVLHSTQDLFLPFFSNVTWFHAIHVS
GTNGTKRFDNPVLPFNDGVYFASTEKSNIIRGWIFGTTLDSKTQSLLIVNNATNVVIKVCEFQFCNDP
FLDVYYHKNNKSWMESEFRVYSSANNCTFEYVSQPFLMDLEGKQGNFKNLREFVFKNIDGYFKIYSKH
TPINLGRDLPQGFSALEPLVDLPIGINITRFQTLLALHRSYLTPGDSSSGWTAGAAAYYVGYLQPRTF
LLKYNENGTITDAVDCALDPLSETKCTLKSFTVEKGIYQTSNFRVQPTESIVRFPNITNLCPFDEVFN
ATRFASVYAWNRKRISNCVADYSVLYNFAPFFAFKCYGVSPTKLNDLCFTNVYADSFVIRGNEVSQIA
PGQTGNIADYNYKLPDDFTGCVIAWNSNKLDSKVGGNYNYLYRLFRKSNLKPFERDISTEIYQAGNKP
CNGVAGFNCYFPLRSYGFRPTYGVGHQPYRVVVLSFELLHAPATVCGPKKSTNLVKNKCVNFNFNGLT
GTGVLTESNKKFLPFQQFGRDIADTTDAVRDPQTLEILDITPCSFGGVSVITPGTNTSNQVAVLYQGV
NCTEVPVAIHADQLTPTWRVYSTGSNVFQTRAGCLIGAEYVNNSYECDIPIGAGICASYQTQTKSHRR
ARSVASQSIIAYTMSLGAENSVAYSNNSIAIPTNFTISVTTEILPVSMTKTSVDCTMYICGDSTECSN
LLLQYGSFCTQLKRALTGIAVEQDKNTQEVFAQVKQIYKTPPIKYFGGFNFSQILPDPSKPSKRSFIE
DLLFNKVTLADAGFIKQYGDCLGDIAARDLICAQKFNGLTVLPPLLTDEMIAQYTSALLAGTITSGWT
FGAGAALQIPFAMQMAYRFNGIGVTQNVLYENQKLIANQFNSAIGKIQDSLSSTASALGKLQDVVNHN
AQALNTLVKQLSSKFGAISSVLNDILSRLDKVEAEVQIDRLITGRLQSLQTYVTQQLIRAAEIRASAN
LAATKMSECVLGQSKRVDFCGKGYHLMSFPQSAPHGVVFLHVTYVPAQEKNFTTAPAICHDGKAHFPR
EGVFVSNGTHWFVTQRNFYEPQIITTDNTFVSGNCDVVIGIVNNTVYDPLQPELDSFKEELDKYFKNH
TSPDVDLGDISGINASVVNIQKEIDRLNEVAKNLNESLIDLQELGKYEQYIKWPWYIWLGFIAGLIAI
VMVTIMLCCMTSCCSCLKGCCSCGSCC*

### Non-Limiting Comments

[0352] An Omicron-specific LNP-mRNA vaccine candidate was designed based on the full-length spike sequence of the Omicron variant (lineage B.1.1.529/BA.1) from two North America patients identified on Nov. 23, 2021 (GISAID EpiCoV: EPI_ISL_6826713 and EPI_ISL_6826714). The spike coding sequence of Wuhan-Hu-1 (WT) and Omicron variant were flanked by 5′ UTR, 3′ UTR and 3′ PolyA tail (FIG. 22A). Six proline mutations (HexaPro) were introduced into the spike gene sequence, as they were reported to improve spike protein stability and prefusion state. The furin cleave site (RRAR) in spike was replaced with GSAS stretch to keep integrity of S1 and S2 units. The transcribed spike mRNA was then encapsulated into lipid nanoparticles to produce WT and Omicron LNP-mRNAs, and characterized the quality and biophysical properties by downstream assays including dynamic light scattering, transmission electron microscope (TEM) and receptor binding assay.

[0353] The dynamic light scattering and transmission electron microscope were applied to evaluate the size distribution and shape of Omicron LNP-mRNA, which showed a monodispersed sphere shape with an average radius of 52 nm and polydispersity index of 0.17 (FIGS. 22C-22E). To evaluate the effectiveness of LNP-mRNA mediated Omicron spike expression in cells as well as the receptor binding ability of the designed Omicron HexaPro spike, Omicron LNP-mRNA was directly added to HEK293T cells 16 hours before subjecting cells to flow cytometry. Evident surface expression of functional Omicron HexaPro spike capable of binding to human angiotensin-converting enzyme-2 (hACE2) was observed by staining cells with hACE2-Fc fusion protein and PE anti-Fc secondary antibody (FIG. 22F). These data showed that the Omicron spike sequence was successfully encoded into an mRNA, encapsulated into the LNP, can be introduced into mammalian cells efficiently without additional manipulation, and express functional spike protein that binds to hACE2.

### Specific Binding and Neutralizing Antibody Response Elicited by Omicron LNP-mRNA Against the Omicron Variant

[0354] After ensuring functional spike expression mediated by Omicron LNP-mRNA, subsequent studies proceeded to characterize the immunogenicity of Omicron LNP-mRNA in vivo. In order to test rapid immune elicitation against Omicron variant, the following vaccination and testing schedule was performed. Two doses of 10 μg Omicron LNP-mRNA, as prime and boost two weeks apart were intramuscularly injected into ten C57BL/6Ncr (B6) mice (FIG. 23A; FIG. 26A). Retro-orbital blood was collected prior to immunization on day 0, 13 and 21, i.e. two weeks post prime (one day before boost), and one week post boost. Plasma from blood was then isolated, which was used in enzyme-linked immunosorbent assay (ELISA) and neutralization assay to quantify binding and neutralizing antibody titers. A significant increase in antibody titers against Omicron spike RBD was observed in ELISA and neutralization assays from plasma samples post prime and boost (FIGS. 23B-23C; FIG. 26A-26B). Neutralization with infectious virus (also commonly referred to as authentic virus or live virus) was performed using a local SARS-CoV-2 Omicron isolate in a biosafety level 3 (BSL3) setting (Methods), and validated that the plasma samples from mice vaccinated with Omicron-specific LNP-mRNA showed potent neutralization activity against infectious Omicron virus, with significant prime/boost effect (FIGS. 23D-23E). These data showed that the Omicron LNP-mRNA induced strong and specific antibody responses in vaccinated mice.

### Waning Immunity of WT LNP-mRNA Immunized Mice

[0355] In light of the wide coverage of the ancestral WT-based LNP-mRNA vaccine (to model those widely administered in the current general population), subsequent studies sought to test: (i) the effect of WT LNP-mRNA vaccination against Omicron variant, (ii) the decay of immunity induced by WT LNP-mRNA over time, and (iii) whether a homologous WT LNP-mRNA booster or a heterologous Omicron LNP-mRNA booster could enhance the waning immunity against Omicron variant, WA-1 and/or Delta variant, and if there is a difference between homologous and heterologous boost. To gain initial answers to these questions in animal models, two cohorts of B6 mice were sequentially vaccinated with two doses of WT and one dose of WT or Omicron LNP-mRNA booster in two independent experiments (Batch 1 in FIG. 27 and batch 2 in FIG. 28). Over 100-day interval between 2nd dose of WT and WT/Omicron booster was ensured in order to observe the waning immunity in WT-vaccinated mice (the combined and individual datasets from the two independent experiments were presented in FIG. 24 and FIGS. 27-28 respectively). Blood samples of these animals was collected in a rational time series, including day 35 (2 weeks post 2^{nd} dose of WT LNP-mRNA), >3.5 months post 2^{nd} doses of WT LNP-mRNA (day 127 in batch 1 or day 166 in batch 2, immediately before WT/Omicron booster), ˜2 weeks post WT/Omicron LNP-mRNA booster (day 140, one day before the second Omicron booster in batch 1 or day 180 in batch 2), and day 148 (1 week post two doses of Omicron LNP-mRNA vaccination in batch 1).

[0356] Plasma samples were isolated from blood samples and analyzed in ELISA and neutralization assays against SARS-CoV-2 Omicron, Delta or WA-1. Comparing to the titers against WA-1 and Delta RBD, the binding antibody titers against Omicron RBD elicited by WT mRNA-LNP were significantly weaker in samples from both day 35 and >3.5 months (FIG. 24B, FIG. 29-30). The group average Omicron reactivity is 15-fold (day 35) and 21-fold (>3.5 months) lower than that of WT RBD (fold change=ratio−1), and 11-fold (day 35) and 14-fold (>3.5 months) lower than Delta (FIG. 30). A steep (orders of magnitude) drop of antibody titers from mice immunized with WT LNP-mRNA was observed after three months (day 35 vs. >3.5 months) from all three RBD datasets. It is worth noting that the antibody titers >3.5 months post WT boost decreased to a level that is near-baseline (Phosphate buffered saline, PBS controls, FIG. 24), particularly for titers against Omicron RBD.

Heterologous Booster with Omicron LNP-mRNA as Compared to Homologous Booster with WT LNP-mRNA in Mice that Previously Received a Two-Dose WT LNP-mRNA Vaccination

[0357] A single dose booster shot, either a homologous booster with WT LNP-mRNA, or a heterologous booster with Omicron LNP-mRNA, drastically increased the antibody titers against Omicron RBD, by over 100-fold as compared to the sample right before booster shot (FIG. 24B), reaching a level comparable to the post-boost titer by Omicron LNP-mRNA alone (FIG. 23B). The mice that received the Omicron LNP-mRNA booster showed a trend of higher binding antibody titer against Omicron RBD than those administered with WT booster. Interestingly, the Omicron LNP-mRNA shot boosted not only titers against Omicron RBD, but also titers against Delta and WA-1 RBD, of which levels were comparable with those elicited by WT LNP-mRNA booster (FIG. 24B). For both WT and Omicron boosters, the extent of titer increase was more drastic in the Omicron RBD dataset than other RBD datasets, signifying the extra benefit of booster shots against Omicron variant (FIG. 24B). The antibody titers did not increase one week after a second booster of Omicron LNP-mRNA (FIG. 27B).

[0358] Because pseudovirus neutralization is a relatively safer and widely-used assay that strongly correlates with infectious virus results and has been regarded as a standard proxy by the field, subsequent studies then set out to first use pseudovirus neutralization assay to measure the neutralizing antibody responses induced by Omicron LNP-mRNA booster in these animals. We first generated human immunodeficiency virus-1 (HIV-1) based Omicron pseudovirus system, which contains identical Omicron mutations in vaccine antigen, but lacks the HexaPro or furin site modifications. Interestingly, it was found that under exactly the same virus production and assay conditions, the Omicron pseudovirus has higher infectivity than both WA-1 (8×increase) and Delta (4×) pseudoviruses (FIGS. 31A-C), which was also observed by another group, in concordance with the Omicron-hACE2 interactions from biophysical and structural studies, and correlated with higher transmissibility reported previously.

[0359] The pseudoviruses were then normalized by functional titers (number of infected cells/volume), and this system was used to perform pseudovirus neutralization assays on all of plasma samples collected (FIG. 31D-E). The neutralization results showed a consistent overall pattern as ELISA results, with a stronger contrast among titers against Omicron pseudovirus (FIG. 24C). On day 35 and >3.5 months post WT boost, the mice showed significantly lower neutralizing antibody titers against Omicron variant than titers against Delta variant or WA-1 (FIG. 32A-B). For the samples two weeks post boost (day 35), the group average Omicron neutralization reactivity is 40-fold lower than that of WA-1 RBD, and 10-fold lower than Delta (FIG. 32B). When comparing samples collected on day 35 and >3.5 months post WT boost, around two orders of magnitude (10s˜100s of fold change) time-dependent titer reduction was unequivocally observed in all three pseudovirus neutralization data (FIG. 23C). The Omicron-neutralization activity of WT vaccinated mice >3.5 months post boost was as low as PBS background (FIG. 23C). These data suggested that there was waning antibody immunity in the standard two-dose WT vaccinated animals, which lost neutralization ability against the Omicron variant pseudovirus.

[0360] A single booster shot of WT or Omicron LNP-mRNA vaccine enhanced the antibody titers against Omicron variant two weeks after the injection by >40-fold (FIG. 24C). The heterologous Omicron LNP-mRNA booster induced significantly higher neutralizing titer against Omicron pseudovirus than the homologous WT LNP-mRNA booster (FIG. 24c). The neutralizing titer after this surge by Omicron vaccine numerically surpassed the titer two weeks post WT vaccine boost (day 35, FIG. 27C). Interestingly, the Omicron mRNA vaccine also rescued the antibody titers against Delta and WA-1 pseudoviruses, with two orders of magnitude increase in both ELISA titers and neutralization activity (FIGS. 24B-24C). The neutralization titers of Delta pseudovirus were found similar between WT and Omicron booster groups (FIG. 24C). A second booster shot two weeks after the first of Omicron mRNA vaccine yielded little increase in neutralization activity against Omicron, WA-1 or Delta variants at the time measured (day 148, 1 week after the second dose) (FIG. 27C). Studies then further evaluated the effects of WT and Omicron LNP-mRNA boosters in infectious virus neutralization assay, which closely correlated with pseudovirus neutralization results. The Omicron LNP-mRNA booster led to over 200-fold increase in neutralizing titers of infectious Omicron virus (FIG. 24D), while WT booster induced a moderate increase (10-fold) in titers against Omicron live virus (FIG. 24D). A significant boost of infectious Delta virus neutralizing titers was observed in mice receiving WT (12-fold) and Omicron (19-fold) LNP-mRNA boosters. A 20-fold difference in post-booster (day 180) neutralizing titers against infectious Omicron virus was observed between WT and Omicron booster groups (FIG. 24D). Together, and without wishing to be bound by theory, these data suggest that while both WT LNP-mRNA and Omicron LNP-mRNA boosters can strengthen the waning immunity; however, the heterologous booster with Omicron-specific mRNA vaccination (WT×2+Omicron×1) has an effect significantly stronger than the homologous booster (WT×3) against the live virus of Omicron variant, with comparable activity against the Delta variant.

[0361] Overall, the ELISA titers, pseudovirus and infectious virus neutralization activity were significantly correlated with each other across all groups and animals tested (FIG. 34). These data suggested that a single dose of Omicron LNP-mRNA heterologous booster not only induced more potent anti-Omicron antibody response than WT booster, but also elicited broad activity against the WA-1 and Delta variant, in mouse models at the timepoints measured.

Cross Reactivity and Epitope Characterization of Plasma Antibodies from Homologous Omicron mRNA, WT mRNA or Heterologous WT+Omicron mRNA Vaccination Schemes

[0362] In light of the broad activity elicited by heterologous vaccination of WT and Omicron LNP-mRNA, subsequent studies then assessed if these vaccination schemes can induce antibody responses against other SARS-CoV-2 variants and other pathogenic Betacoronavirus species. It was sought to answer these questions by characterizing and comparing the anti-coronavirus cross reactivity conferred by Omicron mRNA vaccination alone, WT mRNA vaccination alone (homologous booster), or their uses in combination (Omicron mRNA vaccination as a heterologous booster on top of WT mRNA vaccination). The cross reactivity was evaluated using six spike RBDs, including SARS-CoV-2 WA-1, Beta (lineage B.1.351) variant, Delta variant, Omicron variant, SARS-CoV spike RBD (SARS RBD) and MERS-CoV spike RBD (MERS RBD). Two doses of Omicron LNP-mRNA induced high titers of antibodies that cross reacted with all spike RBDs tested except for MERS RBD, which shared low sequence identity (<40%) to SARS or SARS-CoV-2 spikes (FIG. 25A). The antibody titer against SARS RBD was significantly lower than those against SARS-CoV-2 WA-1 or variants (FIG. 35A). Among the SARS-CoV-2 variants characterized, the antibody response to Delta variant by Omicron LNP-mRNA was slightly weaker than others. Both WT and Omicron boosters after WT LNP-mRNA prime and boost led to potent antibody response to SARS-CoV and SARS-CoV-2 Beta variant (FIG. 25B), while the response to MERS RBD was negligible and similar to PBS control. Within each ELISA antigen except for MERS RBD and Omicron RBD, the antibody response post WT or Omicron boosters (3 shots total) was numerically higher than that of plasma samples post a two-dose Omicron vaccine (Omicron×2) (FIG. 35C).

[0363] A number of studies have shown that antibodies whose epitopes overlap with hACE2-binding motif were largely escaped by RBD mutations in variants of concerns, while antibodies whose epitopes fall outside the hACE2-binding motif were rarer and often exhibit broad neutralizing activity to SARS-like Betacoroanviruses (Sarbecoviruses). Because of such correlation between antibody epitope and cross reactivity, competition ELISA was performed using hACE2 or antibodies with known epitopes as competing agents to evaluate the epitopes, population and affinity of plasma antibodies elicited by Omicron or WT LNP-mRNA. The epitopes of RBD can be categorized into several major classes based on cluster analysis of available neutralizing antibody-RBD complex structures. Representative antibodies in each major epitope classes were displayed by aligning them with the recently solved Omicron RBD: hACE2 complex structure (FIG. 25C). hACE2 and antibody competition ELISA was then performed using hACE2, Clone 13A, S309 and CR3022 as competing reagents to see if and to what extent group A-D class I-III, epitopes overlapped with hACE2) and group E-F (class IV, S309 and CR3022) antibodies were induced by these immunization schemes. Low-density Omicron RBD was coated in ELISA plate to ensure adequate competition between plasma antibodies and competing hACE2 or antibodies. In two independent experiments (hACE2 and antibody competition assays), the baseline titer of heterologous Omicron booster treated mice (WT×2+Omicron) in the absence of competing reagents was significantly higher than those of homologous WT booster treated mice (WT×3), or mice receiving Omicron vaccination alone (Omicron×2) (FIG. 25D). Addition of high concentration hACE2 (Methods) resulted in a significant reduction of plasma antibody titers in mice vaccinated with Omicron (Omicron×2), WT (WT×3) or WT+Omicron (WT×2+Omicron) LNP-mRNA (FIG. 25E). In the antibody competition assay, we used three antibodies with known RBD epitopes. Two of them (CR3022 and S309) are well-characterized representative antibodies from non-hACE2 competing classes. The Clone 13A is a humanized neutralizing antibody disclosed by a previous study and has an epitope that overlaps with the hACE2 binding motif. All three antibodies led to a significant decrease of plasma titers from Omicron vaccinated mice (Omicron×2), while only CR3022 and S309 mediated a titer reduction in WT booster group (WT×3) (FIG. 25F). The WT+Omicron heterologous vaccination group showed minimal titer changes to all three antibodies (FIG. 25F). These data suggested that a significant percentage of the pool of antibodies elicited by Omicron- or WT-vaccination shared binding epitopes with hACE2. In addition, antibody competition ELISA showed that both Omicron LNP-mRNA and WT LNP-mRNA vaccinated animals contained plasma antibodies targeting rare epitopes in class IV (or group E/F), which often exhibit broad activity against Sarbecoviruses.

### Selected Discussion

[0364] The rapid spread of Omicron around the world, especially in countries with wide coverage of vaccines designed based on the ancestral antigen (e.g. WT mRNA vaccine), is particularly concerning. The extensive mutations in the Omicron spike gene mark a dramatic alteration in its antigenicity. Omicron has high transmissibility and high level of immune evasion from WT mRNA vaccine induced immunity, which was reported from various emerging literature. Omicron's strong association with reinfection or breakthrough infection and its heavily altered antigenicity prompted the idea of developing Omicron-specific mRNA vaccine.

[0365] As of Feb. 20, 2022, 4.35 billion people, i.e. 56% of the global population, received COVID-19 vaccination (Our World in Data). Almost all those vaccines were designed based on the antigen from the ancestral virus, including the two approved mRNA vaccine BNT162b2 and mRNA-1273. Individuals receiving existing COVID-19 vaccines have waning immunity over time. Consistent with past reports, the studies of the present disclosure observed a dramatic time-dependent decrease (around 40-fold) of antibody titers against Omicron, Delta variants and WA-1 strains 3 months after the second dose of WT mRNA vaccine in mice. This observed waning immunity is particularly concerning in the scenario of rapid spreading of Omicron variant, which largely escapes the humoral immune response elicited by WT mRNA vaccines as evident in published studies as well as in the current data. A recent report showed waning immunity in vaccinated individuals and that a booster shot using the WT based mRNA vaccine helps recover partial immunity. The data of the present disclosure showed that the neutralizing antibody titers after the boost with a WT based vaccine were still lower against Omicron than against WA-1 and other variants, urging for development and testing of an Omicron-specific vaccine. Vaccinee receiving heterologous vaccination of WT and Omicron LNP-mRNA have been exposed to both antigens and may have robust antibody response against cognate strains and other VoCs. Thus, it is important to evaluate and compare the immunogenicity of Omicron-specific vaccine candidate with WT vaccine as booster shots on top of two doses of WT mRNA vaccine. In fact, very recently, both Pfizer and Moderna have started their clinical trials to evaluate the efficacy of Omicron-specific mRNA vaccine in either homologous or heterologous vaccination settings. Moderna has released an updated Phase 2/3 clinical trial for their Omicron-specific mRNA vaccine (mRNA-1273.529) along with the WT vaccine mRNA-1273 against COVID-19 Omicron variant (NCT05249829). The scale and swiftness of initiating these clinical trials exemplify the clinical importance and urgent need of curbing the Omicron surge and evaluating the Omicron-specific mRNA vaccine.

[0366] In this study, a HexaPro-version of the full-length Omicron spike LNP-mRNA vaccine candidate was generated. In mouse models, it was found that it can induce potent Omicron-specific and broad anti-Sarbecovirus antibody response. With this vaccine candidate, its boosting effect was compared with WT counterpart on animals that previously received two-dose WT mRNA vaccine. An observation is that a single dose of WT or Omicron boosters significantly strengthened the waning immunity against Omicron and Delta variants. A number of recent preprints generated and tested Omicron-specific vaccine candidates, which had different vaccine antigen designs, compositions, and showed varying results of antibody responses alone or as boosters. Three of them focused on evaluation of Omicron RBD mRNA vaccine alone in mice through neutralization assay and reported antibody response against Omicron but not other variants. Two studies characterized the Omicron full-length spike mRNA stabilized by two proline mutations (S-2P) and compared their boosting efficacy with WT vaccine in mice and macaque. Recently published reports have shown that both WT and Omicron full-length spike mRNA boosters provided equivalent protection from Omicron challenge in non-human primates (NHPs) or mice. These results shared some commonalities, i.e. the effectiveness of an Omicron-specific vaccine; however, they diverged in the specific titers, as well as in the difference between WT- and Omicron-specific vaccines, potentially due to differences in vaccine antigen designs, compositions, modifications, experimental settings, animal models, or a combination of factors. The present study evaluated the potency of an Omicron-specific full-length spike mRNA vaccine with HexaPro mutations, which were shown to stabilize the spike in prefusion state. Through well-correlated data from ELISA, pseudovirus and infection virus neutralization assays, we showed that both WT and Omicron boosters significantly restored waning immunity against Omicron and Delta variants. Interestingly, without sacrificing potency against Delta, heterologous Omicron booster achieved significantly higher neutralizing titers against Omicron than homologous WT booster. This observation is in line with findings from heterologous booster vaccination of different COVID-19 vaccines in clinical trials. The broad anti-coronavirus activity after homologous or heterologous boosting was likely associated with plasma antibodies in rarer epitope classes, as observed in competition ELISA.

[0367] The neutralizing antibody level is highly predictive of immune protection from SARS-CoV-2 infection and the initial neutralization level is associated with decay of vaccine efficacy over time. Compared to WT booster, the studies presented herein found that Omicron booster group consistently showed 10-20 fold higher titers against Omicron variant in ELISA, pseudovirus and infectious virus neutralization assays. Within the WT vaccinated group, the titer contrast against Omicron vs. Delta variants persisted over time. Omicron-booster group have been exposed to both WT and Omicron antigens and showed equally potent titers against Omicron and Delta. While our study is in animals, the antibody responses to vaccination are conserved between mouse and human, highlighted by the fact that mice are the main preclinical model used by vaccine developers.

[0368] The titer against Omicron by single dose Omicron LNP-mRNA was similar to that observed 2 weeks post boost of WT LNP-mRNA (log 10 AUC or log 10 IC50 around 3), although it is still unclear whether the potency of the Omicron mRNA vaccine is associated with the high number of Omicron mutations. As various extent of cross reactivity was observed among WT and/or Omicron vaccinated animals, we sought to understand their cross-reactive immunity by characterizing vaccine-elicited antibody epitopes and population through competition ELISA. In the Omicron RBD competition ELISA, the baseline titer of Omicron LNP-mRNA booster group (WT×2+Omicron) was significantly higher than WT booster (WT×3) or Omicron LNP-mRNA (Omicron×2), which may explain its lower susceptibility to the block of competing antibodies. All three vaccination groups showed significant titer reduction in presence of hACE2, suggestive of abundant plasma antibody population sharing hACE2 binding epitopes, which are often associated with immune escape by variants mutations. The plasma from mice vaccinated with two doses of Omicron LNP-mRNA (Omicron×2) or three doses of WT LNP-mRNA (WT×3) exhibited comparable baseline titers and significant titer decrease when co-incubated with CR3022 or S309 blocking antibodies, indicating the existence of plasma antibody population sharing group E/F or class IV epitopes. Because of their similar baseline titers, the greater titer reduction in WT booster group may stem from larger population of group E/F antibodies, which was associated higher cross-reactive response against SARS RBD (FIG. 35C). Albeit insignificant, the titer change of Omicron booster group (WT×2+Omicron) by S309 antibody was greatest among three competing antibodies, hinting a role of epitope IV antibodies in the cross immunity elicited by heterologous vaccination of WT and Omicron LNP-mRNA.

[0369] In summary, this study generated an Omicron-specific HexaPro spike LNP-mRNA vaccine candidate, studied its immunogenicity, and compared it with the WT counterpart in the context of previously WT vaccinated animals. The results presented herein showed that a single dose of either a homologous booster with WT LNP-mRNA or a heterologous booster with Omicron LNP-mRNA restored the waning antibody response, with over 200-fold titer increase by Omicron boosters. Interestingly, the heterologous Omicron LNP-mRNA booster elicited Omicron neutralizing titers higher than the homologous WT booster. The heterologous Omicron booster shot provided strong neutralizing antibody response against Omicron variant and comparable humoral antibody against WA-1 and Delta variants. All three types of vaccination, including Omicron mRNA alone, WT mRNA alone, and Omicron as a heterologous booster on top of WT mRNA, elicited broad antibody responses, including activities against SARS-CoV-2 VoCs, as well as other Betacoronavirus species such as SARS-CoV, but not MERS-CoV. Together, these data provided direct proof-of-concept assessments of Omicron-specific mRNA vaccination in vivo, both alone and as a heterologous booster to the existing widely-used mRNA vaccine form.

### Example 6: Development of a Bivalent mRNA Vaccine Booster Against Omicron Subvariants BA.2, BA.2.12.1 and BA.5

### Materials and Methods

[0370] Molecular cloning and mRNA preparation. The WT and Delta spike plasmids were cloned in a previous study (Peng L, et al. Cell Rep Med (2022) 3:100634; Peng L, et al. bioRxiv (2022) Posted on 2022 Mar. 23). BA.2 spike plasmid was cloned based on the isolate sequencing data in GISAID EpiCoV (EPI_ISL_6795834.2) 9. WT, Delta and BA.2 spike plasmids were linearized by restriction enzymes and transcribed to mRNA by in vitro T7 RNA polymerase (NEB, Cat #E2060S) as previously described.

[0371] Cell culture. hACE2-293 FT and 293T cells were cultured in Dulbecco's minimal essential medium (DMEM, Fisher) supplemented with 10% fetal bovine serum (Hyclone) and penicillin (100 U/ml)-streptomycin (100 μg/ml). Cells were split every other day at a 1:4 ratio when confluency is over 90%.

[0372] Lipid nanoparticle mRNA preparation. In brief, lipids mixture was solubilized in ethanol and mixed with spike mRNA in pH 5.2 sodium acetate buffer. The mRNA encapsulated by LNP (LNP-mRNA) was then buffer exchanged to PBS using 100 kDa Amicon filter (Macrosep Centrifugal Devices 100K, 89131-992). The size distribution of LNP-mRNA was evaluated by dynamic light scatter (DynaPro NanoStar, Wyatt, WDPN-06). The Quant-iT™ RiboGreen™ (Thermo Fisher) RNA Assay was applied to determine encapsulation rate and mRNA amount.

[0373] Animal vaccination. Animal immunization was performed on 16-18 weeks female C57BL/6Ncr mice purchased from Charles River. Mice were vaccinated with two doses of 1.5 μg WT LNP-mRNA on day 0 and day 14 followed by 1.5 μg WT, Delta, Omicron BA.2 monovalent booster or Delta & BA.2 bivalent booster on day 29. The plasma samples were isolated from blood, which was collected before vaccination on day 0, two weeks after WT boost on day 28 and two weeks after monovalent or bivalent boosters on day 42.

[0374] ELISA and Neutralization assay. The binding and neutralizing antibody titers were determined by ELISA and pseudovirus neutralization assay as previously described. NanoGlo luciferase assay system (Promega N1120) was applied to determine the pseudovirus infection level in hACE2-293 FT cells. The ELISA antigens including RBDs of WT (Sino 40592-V08B), Delta (Sino 40592-V08H90), Omicron BA.2 (Acro SPD-C522g-100 μg), BA.2.12.1 (Acro SPD-C522q-100 μg) and BA.4/5 (Acro SPD-C522r-100 μg) were purchased from Sino Biological and AcroBiosystems. The ELISA ECD antigens including WT (Sino 40589-V08B1), Delta (Sino 40589-V08B16), Omicron BA.2 (Acro SPN-C5223-50 μg), BA.2.12.1 (Acro SPN-C522d-50 μg) and BA.4/5 (SPN-C5229-50 μg) were purchased from Sino Biological and AcroBiosystems. The pseudovirus plasmids of spike without HexaPro mutations were generated based on the WT plasmid which was a gift from Dr. Bieniasz's lab.

pZF89 Omicron BA.2.12.1 Spike Pseudovirus del19
(SEQ ID NO: 36)
gacggatcgggagatctcccgatcccctatggtgcactctcagtacaatctgctctgatgccgcatag
ttaagccagtatctgctccctgcttgtgtgttggaggtcgctgagtagtgcgcgagcaaaatttaagc
tacaacaaggcaaggcttgaccgacaattgcatgaagaatctgcttagggttaggcgttttgcgctgc
ttcgcgatgtacgggccagatatacgcgttgacattgattattgactagttattaatagtaatcaatt
acggggtcattagttcatagcccatatatggagttccgcgttacataacttacggtaaatggcccgcc
tggctgaccgcccaacgacccccgcccattgacgtcaataatgacgtatgttcccatagtaacgccaa
tagggactttccattgacgtcaatgggtggagtatttacggtaaactgcccacttggcagtacatcaa
gtgtatcatatgccaagtacgccccctattgacgtcaatgacggtaaatggcccgcctggcattatgc
ccagtacatgaccttatgggactttcctacttggcagtacatctacgtattagtcatcgctattacca
tggtgatgcggttttggcagtacatcaatgggcgtggatagcggtttgactcacggggatttccaagt
ctccaccccattgacgtcaatgggagtttgttttggcaccaaaatcaacgggactttccaaaatgtcg
taacaactccgccccattgacgcaaatgggcggtaggcgtgtacggtgggaggtctatataagcagag
ctctctggctaactagagaacccactgcttactggcttatcgaaattaatacgactcactatagggag
acccaagctggctagccaccATgTTTGTGTTCCTGGTGCTGCTGCCACTGGTGTCCAGCCAGTGTGTG
AACCTGATCACCAGGACCCAAAGCTACACCAACTCCTTCACCAGGGGAGTCTACTACCCTGACAAGGT
GTTCAGGTCCTCTGTGCTGCACAGCACCCAGGACCTGTTCCTGCCATTCTTCAGCAATGTGACCTGGT
TCCATGCCATCCACGTGTCTGGCACCAATGGCACCAAGAGGTTTGACAACCCTGTGCTGCCATTCAAT
GATGGAGTCTACTTTGCCAGCACCGAGAAGAGCAACATCATCAGGGGCTGGATTTTTGGCACCACCCT
GGACAGCAAGACCCAGTCCCTGCTGATTGTGAACAATGCCACCAATGTGGTGATTAAGGTGTGTGAGT
TCCAGTTCTGTAATGACCCATTCCTGGacGTGTACTACCACAAGAACAACAAGTCCTGGATGGAGTCT
GAGTTCAGGGTCTACTCCTCTGCCAACAACTGTACCTTTGAATATGTGAGCCAACCATTCCTGATGGA
CTTGGAGGGCAAGCAGGGCAACTTCAAGAACCTGAGGGAGTTTGTGTTCAAGAACATTGATGGCTACT
TCAAGATTTACAGCAAACACACACCAATCAACCTGGGCAGAGACCTGCCACAGGGCTTCTCTGCCTTG
GAACCACTGGTGGACCTGCCAATTGGCATCAACATCACCAGGTTCCAGACCCTGCTGGCTCTGCACAG
GTCCTACCTGACACCTGGAGACTCCTCCTCTGGCTGGACAGCAGGAGCAGCAGCCTACTATGTGGGCT
ACCTCCAACCAAGGACCTTCCTGCTGAAATACAATGAGAATGGCACCATCACAGATGCTGTGGACTGT
GCCCTGGACCCACTGTCTGAGACCAAGTGTACCCTGAAATCCTTCACAGTGGAGAAGGGCATCTACCA
GACCAGCAACTTCAGGGTCCAACCAACAGAGAGCATTGTGAGGTTTCCAAACATCACCAACCTGTGTC
CATTTGacGAGGTGTTCAAcGCCACCAGGTTTGCCTCTGTCTATGCCTGGAACAGGAAGAGGATTAGC
AACTGTGTGGCTGACTACTCTGTGCTCTACAACTTCGCCCCCTTCttCGCCTTCAAGTGTTATGGAGT
GAGCCCAACCAAACTGAATGACCTGTGTTTCACCAATGTCTATGCTGACTCCTTTGTGATTAGGGGAA
ACGAGGTGAGCCAGATTGCCCCTGGACAAACAGGCAACATTGCTGACTACAACTACAAACTGCCTGAT
GACTTCACAGGCTGTGTGATTGCCTGGAACAGCAACAAqCTGGACAGCAAGGTGGGCGGCAACTACAA
CTACCAGTACAGACTGTTCAGGAAGAGCAACCTGAAACCATTTGAGAGGGACATCAGCACAGAGATTT
ACCAGGCTGGCAaCAagCCATGTAATGGAGTGGCCGGCTTCAACTGTTACTTTCCACTCCggTCCTAT
GGCTTCCggCCAACCtacGGAGTGGGCcACCAACCATACAGGGTGGTGGTGCTGTCCTTTGAACTGCT
CCATGCCCCTGCCACAGTGTGTGGACCAAAGAAGAGCACCAACCTGGTGAAGAACAAGTGTGTGAACT
TCAACTTCAATGGACTGACCGGCACAGGAGTGCTGACAGAGAGCAACAAGAAGTTCCTGCCATTCCAA
CAGTTTGGCAGGGACATTGCTGACACCACAGATGCTGTGAGGGACCCACAGACCTTGGAGATTCTGGA
CATCACACCATGTTCCTTTGGAGGAGTGTCTGTGATTACACCTGGCACCAACACCAGCAACCAGGTGG
CTGTGCTCTACCAGGqCGTGAACTGTACTGAGGTGCCTGTGGCTATCCATGCTGACCAACTTACACCA
ACCTGGAGGGTCTACAGCACAGGCAGCAATGTGTTCCAGACCAGGGCTGGCTGTCTGATTGGAGCAGA
GtacGTGAACAACTCCTATGAGTGTGACATCCCAATTGGAGCAGGCATCTGTGCCTCCTACCAGACCC
AGACCAAgAGCCacAGGAGGGCAAGGTCTGTGGCAAGCCAGAGCATCATTGCCTACACAATGAGTCTG
GGAGCAGAGAACCTGGTGGCTTACAGCAACAACAGCATTGCCATCCCAACCAACTTCACCATCTCTGT
GACCACAGAGATTCTGCCTGTGAGTATGACCAAGACCTCTGTGGACTGTACAATGTATATCTGTGGAG
ACAGCACAGAGTGTAGCAACCTGCTGCTCCAATATGGCTCCTTCTGTACCCAACTTAAgAGGGCTCTG
ACAGGCATTGCTGTGGAACAGGACAAGAACACCCAGGAGGTGTTTGCCCAGGTGAAGCAGATTTACAA
GACACCTCCAATCAAGtACTTTGGAGGCTTCAACTTCAGCCAGATTCTGCCTGACCCAAGCAAGCCAA
GCAAGAGGTCCTTCATTGAGGACCTGCTGTTCAACAAGGTGACCCTGGCTGATGCTGGCTTCATCAAG
CAATATGGAGACTGTCTGGGAGACATTGCTGCCAGGGACCTGATTTGTGCCCAGAAGTTCAACGGACT
GACAGTGCTGCCTCCACTGCTGACAGATGAGATGATTGCCCAATACACCTCTGCCCTGCTGGCTGGCA
CCATCACCTCTGGCTGGACCTTTGGAGCAGGAGCAGCCCTCCAAATCCCATTTGCTATGCAGATGGCT
TACAGGTTCAATGGCATTGGAGTGACCCAGAATGTGCTCTATGAGAACCAGAAACTGATTGCCAACCA
GTTCAACTCTGCCATTGGCAAGATTCAGGACTCCCTGTCCAGCACAGCCTCTGCCCTGGGCAAGCTCC
AAGATGTGGTGAACCACAATGCCCAGGCTCTGAACACCCTGGTGAAGCAACTTTCCAGCAAgTTTGGA
GCCATCTCCTCTGTGCTGAATGACATCCTGAGCAGACTGGACAAGGTGGAGGCTGAGGTCCAGATTGA
CAGACTGATTACAGGCAGACTCCAATCCCTCCAAACCTATGTGACCCAACAACTTATCAGGGCTGCTG
AGATTAGGGCATCTGCCAACCTGGCTGCCACCAAGATGAGTGAGTGTGTGCTGGGACAAAGCAAGAGG
GTGGACTTCTGTGGCAAGGGCTACCACCTGATGAGTTTTCCACAGTCTGCCCCTCATGGAGTGGTGTT
CCTGCATGTGACCTATGTGCCTGCCCAGGAGAAGAACTTCACCACAGCCCCTGCCATCTGCCATGATG
GCAAGGCTCACTTTCCAAGGGAGGGAGTGTTTGTGAGCAATGGCACCCACTGGTTTGTGACCCAGAGG
AACTTCTATGAACCACAGATTATCACCACAGACAACACCTTTGTGTCTGGCAACTGTGATGTGGTGAT
TGGCATTGTGAACAACACAGTCTATGACCCACTCCAACCTGAACTGGACTCCTTCAAGGAGGAACTGG
ACAAATACTTCAAGAACCACACCAGCCCTGATGTGGACCTGGGAGACATCTCTGGCATCAATGCCTCT
GTGGTGAACATCCAGAAGGAGATTGACAGACTGAATGAGGTGGCTAAGAACCTGAATGAGTCCCTGAT
TGACCTCCAAGAACTGGGCAAATATGAACAATACATCAAGTGGCCATGGTACATCTGGCTGGGCTTCA
TTGCTGGACTGATTGCCATTGTGATGGTGACCATAATGCTGTGTTGTATGACCTCCTGTTGTTCCTGT
CTGAAAGGCTGTTGTTCCTGTGGCTCCTGTTGTTGAggatccgagctcggtaccaagcttaagtttaa
accgctgatcagcctcgactgtgccttctagttgccagccatctgttgtttgcccctcccccgtgcct
tccttgaccctggaaggtgccactcccactgtcctttcctaataaaatgaggaaattgcatcgcattg
tctgagtaggtgtcattctattctggggggtggggtggggcaggacagcaagggggaggattgggaag
acaatagcaggcatgctggggatgcggtgggctctatggcttctgaggcggaaagaaccagctggggc
tctagggggtatccccacgcgccctgtagcggcgcattaagcgcggcgggtgtggtggttacgcgcag
cgtgaccgctacacttgccagcgccctagcgcccgctcctttcgctttcttcccttcctttctcgcca
cgttcgccggctttccccgtcaagctctaaatcgggggctccctttagggttccgatttagtgcttta
cggcacctcgaccccaaaaaacttgattagggtgatggttcacgtagtgggccatcgccctgatagac
ggtttttcgccctttgacgttggagtccacgttctttaatagtggactcttgttccaaactggaacaa
cactcaaccctatctcggtctattcttttgatttataagggattttgccgatttcggcctattggtta
aaaaatgagctgatttaacaaaaatttaacgcgaattaattctgtggaatgtgtgtcagttagggtgt
ggaaagtccccaggctccccagcaggcagaagtatgcaaagcatgcatctcaattagtcagcaaccag
gtgtggaaagtccccaggctccccagcaggcagaagtatgcaaagcatgcatctcaattagtcagcaa
ccatagtcccgcccctaactccgcccatcccgcccctaactccgcccagttccgcccattctccgccc
catggctgactaattttttttatttatgcagaggccgaggccgcctctgcctctgagctattccagaa
gtagtgaggaggcttttttggaggcctaggcttttgcaaaaagctcccgggagcttgtatatccattt
tcggatctgatcaagagacaggatgaggatcgtttcgcatgattgaacaagatggattgcacgcaggt
tctccggccgcttgggtggagaggctattcggctatgactgggcacaacagacaatcggctgctctga
tgccgccgtgttccggctgtcagcgcaggggcgcccggttctttttgtcaagaccgacctgtccggtg
ccctgaatgaactgcaggacgaggcagcgcggctatcgtggctggccacgacgggcgttccttgcgca
gctgtgctcgacgttgtcactgaagcgggaagggactggctgctattgggcgaagtgccggggcagga
tctcctgtcatctcaccttgctcctgccgagaaagtatccatcatggctgatgcaatgcggcggctgc
atacgcttgatccggctacctgcccattcgaccaccaagcgaaacatcgcatcgagcgagcacgtact
cggatggaagccggtcttgtcgatcaggatgatctggacgaagagcatcaggggctcgcgccagccga
actgttcgccaggctcaaggcgcgcatgcccgacggcgaggatctcgtcgtgacccatggcgatgcct
gcttgccgaatatcatggtggaaaatggccgcttttctggattcatcgactgtggccggctgggtgtg
gcggaccgctatcaggacatagcgttggctacccgtgatattgctgaagagcttggcggcgaatgggc
tgaccgcttcctcgtgctttacggtatcgccgctcccgattcgcagcgcatcgccttctatcgccttc
ttgacgagttcttctgagcgggactctggggttcgaaatgaccgaccaagcgacgcccaacctgccat
cacgagatttcgattccaccgccgccttctatgaaaggttgggcttcggaatcgttttccgggacgcc
ggctggatgatcctccagcgcggggatctcatgctggagttcttcgcccaccccaacttgtttattgc
agcttataatggttacaaataaagcaatagcatcacaaatttcacaaataaagcatttttttcactgc
attctagttgtggtttgtccaaactcatcaatgtatcttatcatgtctgtataccgtcgacctctagc
tagagcttggcgtaatcatggtcatagctgtttcctgtgtgaaattgttatccgctcacaattccaca
caacatacgagccggaagcataaagtgtaaagcctggggtgcctaatgagtgagctaactcacattaa
ttgcgttgcgctcactgcccgctttccagtcgggaaacctgtcgtgccagctgcattaatgaatcggc
caacgcgcggggagaggcggtttgcgtattgggcgctcttccgcttcctcgctcactgactcgctgcg
ctcggtcgttcggctgcggcgagcggtatcagctcactcaaaggcggtaatacggttatccacagaat
caggggataacgcaggaaagaacatgtgagcaaaaggccagcaaaaggccaggaaccgtaaaaaggcc
gcgttgctggcgtttttccataggctccgcccccctgacgagcatcacaaaaatcgacgctcaagtca
gaggtggcgaaacccgacaggactataaagataccaggcgtttccccctggaagctccctcgtgcgct
ctcctgttccgaccctgccgcttaccggatacctgtccgcctttctcccttcgggaagcgtggcgctt
tctcatagctcacgctgtaggtatctcagttcggtgtaggtcgttcgctccaagctgggctgtgtgca
cgaaccccccgttcagcccgaccgctgcgccttatccggtaactatcgtcttgagtccaacccggtaa
gacacgacttatcgccactggcagcagccactggtaacaggattagcagagcgaggtatgtaggcggt
gctacagagttcttgaagtggtggcctaactacggctacactagaagaacagtatttggtatctgcgc
tctgctgaagccagttaccttcggaaaaagagttggtagctcttgatccggcaaacaaaccaccgctg
gtagcggtggtttttttgtttgcaagcagcagattacgcgcagaaaaaaaggatctcaagaagatcct
ttgatcttttctacggggtctgacgctcagtggaacgaaaactcacgttaagggattttggtcatgag
attatcaaaaaggatcttcacctagatccttttaaattaaaaatgaagttttaaatcaatctaaagta
tatatgagtaaacttggtctgacagttaccaatgcttaatcagtgaggcacctatctcagcgatctgt
ctatttcgttcatccatagttgcctgactccccgtcgtgtagataactacgatacgggagggcttacc
atctggccccagtgctgcaatgataccgcgagacccacgctcaccggctccagatttatcagcaataa
accagccagccggaagggccgagcgcagaagtggtcctgcaactttatccgcctccatccagtctatt
aattgttgccgggaagctagagtaagtagttcgccagttaatagtttgcgcaacgttgttgccattgc
tacaggcatcgtggtgtcacgctcgtcgtttggtatggcttcattcagctccggttcccaacgatcaa
ggcgagttacatgatcccccatgttgtgcaaaaaagcggttagctccttcggtcctccgatcgttgtc
agaagtaagttggccgcagtgttatcactcatggttatggcagcactgcataattctcttactgtcat
gccatccgtaagatgcttttctgtgactggtgagtactcaaccaagtcattctgagaatagtgtatgc
ggcgaccgagttgctcttgcccggcgtcaatacgggataataccgcgccacatagcagaactttaaaa
gtgctcatcattggaaaacgttcttcggggcgaaaactctcaaggatcttaccgctgttgagatccag
ttcgatgtaacccactcgtgcacccaactgatcttcagcatcttttactttcaccagcgtttctgggt
gagcaaaaacaggaaggcaaaatgccgcaaaaaagggaataagggcgacacggaaatgttgaatactc
atactcttcctttttcaatattattgaagcatttatcagggttattgtctcatgagcggatacatatt
tgaatgtatttagaaaaataaacaaataggggttccgcgcacatttccccgaaaagtgccacctgacg
tc
pZF90 Omicron BA.4 Spike Pseudovirus del19
(SEQ ID NO: 37)
gacggatcgggagatctcccgatcccctatggtgcactctcagtacaatctgctctgatgccgcatag
ttaagccagtatctgctccctgcttgtgtgttggaggtcgctgagtagtgcgcgagcaaaatttaagc
tacaacaaggcaaggcttgaccgacaattgcatgaagaatctgcttagggttaggcgttttgcgctgc
ttcgcgatgtacgggccagatatacgcgttgacattgattattgactagttattaatagtaatcaatt
acggggtcattagttcatagcccatatatggagttccgcgttacataacttacggtaaatggcccgcc
tggctgaccgcccaacgacccccgcccattgacgtcaataatgacgtatgttcccatagtaacgccaa
tagggactttccattgacgtcaatgggtggagtatttacggtaaactgcccacttggcagtacatcaa
gtgtatcatatgccaagtacgccccctattgacgtcaatgacggtaaatggcccgcctggcattatgc
ccagtacatgaccttatgggactttcctacttggcagtacatctacgtattagtcatcgctattacca
tggtgatgcggttttggcagtacatcaatgggcgtggatagcggtttgactcacggggatttccaagt
ctccaccccattgacgtcaatgggagtttgttttggcaccaaaatcaacgggactttccaaaatgtcg
taacaactccgccccattgacgcaaatgggcggtaggcgtgtacggtgggaggtctatataagcagag
ctctctggctaactagagaacccactgcttactggcttatcgaaattaatacgactcactatagggag
acccaagctggctagccaccATgTTTGTGTTCCTGGTGCTGCTGCCACTGGTGTCCAGCCAGTGTGTG
AACCTGATCACCAGGACCCAAAGCTACACCAACTCCTTCACCAGGGGAGTCTACTACCCTGACAAGGT
GTTCAGGTCCTCTGTGCTGCACAGCACCCAGGACCTGTTCCTGCCATTCTTCAGCAATGTGACCTGGT
TCCATGCCATCTCTGGCACCAATGGCACCAAGAGGTTTGACAACCCTGTGCTGCCATTCAATGATGGA
GTCTACTTTGCCAGCACCGAGAAGAGCAACATCATCAGGGGCTGGATTTTTGGCACCACCCTGGACAG
CAAGACCCAGTCCCTGCTGATTGTGAACAATGCCACCAATGTGGTGATTAAGGTGTGTGAGTTCCAGT
TCTGTAATGACCCATTCCTGGacGTGTACTACCACAAGAACAACAAGTCCTGGATGGAGTCTGAGTTC
AGGGTCTACTCCTCTGCCAACAACTGTACCTTTGAATATGTGAGCCAACCATTCCTGATGGACTTGGA
GGGCAAGCAGGGCAACTTCAAGAACCTGAGGGAGTTTGTGTTCAAGAACATTGATGGCTACTTCAAGA
TTTACAGCAAACACACACCAATCAACCTGGGCAGAGACCTGCCACAGGGCTTCTCTGCCTTGGAACCA
CTGGTGGACCTGCCAATTGGCATCAACATCACCAGGTTCCAGACCCTGCTGGCTCTGCACAGGTCCTA
CCTGACACCTGGAGACTCCTCCTCTGGCTGGACAGCAGGAGCAGCAGCCTACTATGTGGGCTACCTCC
AACCAAGGACCTTCCTGCTGAAATACAATGAGAATGGCACCATCACAGATGCTGTGGACTGTGCCCTG
GACCCACTGTCTGAGACCAAGTGTACCCTGAAATCCTTCACAGTGGAGAAGGGCATCTACCAGACCAG
CAACTTCAGGGTCCAACCAACAGAGAGCATTGTGAGGTTTCCAAACATCACCAACCTGTGTCCATTTG
acGAGGTGTTCAACGCCACCAGGTTTGCCTCTGTCTATGCCTGGAACAGGAAGAGGATTAGCAACTGT
GTGGCTGACTACTCTGTGCTCTACAACTTCGCCCCCTTCttCGCCTTCAAGTGTTATGGAGTGAGCCC
AACCAAACTGAATGACCTGTGTTTCACCAATGTCTATGCTGACTCCTTTGTGATTAGGGGAAACGAGG
TGAGCCAGATTGCCCCTGGACAAACAGGCAACATTGCTGACTACAACTACAAACTGCCTGATGACTTC
ACAGGCTGTGTGATTGCCTGGAACAGCAACAAqCTGGACAGCAAGGTGGGCGGCAACTACAACTACAG
ATACAGACTGTTCAGGAAGAGCAACCTGAAACCATTTGAGAGGGACATCAGCACAGAGATTTACCAGG
CTGGCAaCAagCCATGTAATGGAGTGGCCGGCGTGAACTGTTACTTTCCACTCCAgTCCTATGGCTTC
CggCCAACCtacGGAGTGGGCcACCAACCATACAGGGTGGTGGTGCTGTCCTTTGAACTGCTCCATGC
CCCTGCCACAGTGTGTGGACCAAAGAAGAGCACCAACCTGGTGAAGAACAAGTGTGTGAACTTCAACT
TCAATGGACTGACCGGCACAGGAGTGCTGACAGAGAGCAACAAGAAGTTCCTGCCATTCCAACAGTTT
GGCAGGGACATTGCTGACACCACAGATGCTGTGAGGGACCCACAGACCTTGGAGATTCTGGACATCAC
ACCATGTTCCTTTGGAGGAGTGTCTGTGATTACACCTGGCACCAACACCAGCAACCAGGTGGCTGTGC
TCTACCAGGgcGTGAACTGTACTGAGGTGCCTGTGGCTATCCATGCTGACCAACTTACACCAACCTGG
AGGGTCTACAGCACAGGCAGCAATGTGTTCCAGACCAGGGCTGGCTGTCTGATTGGAGCAGAGtacGT
GAACAGCTCCTATGAGTGTGACATCCCAATTGGAGCAGGCATCTGTGCCTCCTACCAGACCCAGACCA
AgAGCCacAGGAGGGCAAGGTCTGTGGCAAGCCAGAGCATCATTGCCTACACAATGAGTCTGGGAGCA
GAGAACTCTGTGGCTTACAGCAACAACAGCATTGCCATCCCAACCAACTTCACCATCTCTGTGACCAC
AGAGATTCTGCCTGTGAGTATGACCAAGACCTCTGTGGACTGTACAATGTATATCTGTGGAGACAGCA
CAGAGTGTAGCAACCTGCTGCTCCAATATGGCTCCTTCTGTACCCAACTTAAgAGGGCTCTGACAGGC
ATTGCTGTGGAACAGGACAAGAACACCCAGGAGGTGTTTGCCCAGGTGAAGCAGATTTACAAGACACC
TCCAATCAAGtACTTTGGAGGCTTCAACTTCAGCCAGATTCTGCCTGACCCAAGCAAGCCAAGCAAGA
GGTCCTTCATTGAGGACCTGCTGTTCAACAAGGTGACCCTGGCTGATGCTGGCTTCATCAAGCAATAT
GGAGACTGTCTGGGAGACATTGCTGCCAGGGACCTGATTTGTGCCCAGAAGTTCAACGGACTGACAGT
GCTGCCTCCACTGCTGACAGATGAGATGATTGCCCAATACACCTCTGCCCTGCTGGCTGGCACCATCA
CCTCTGGCTGGACCTTTGGAGCAGGAGCAGCCCTCCAAATCCCATTTGCTATGCAGATGGCTTACAGG
TTCAATGGCATTGGAGTGACCCAGAATGTGCTCTATGAGAACCAGAAACTGATTGCCAACCAGTTCAA
CTCTGCCATTGGCAAGATTCAGGACTCCCTGTCCAGCACAGCCTCTGCCCTGGGCAAGCTCCAAGATG
TGGTGAACCACAATGCCCAGGCTCTGAACACCCTGGTGAAGCAACTTTCCAGCAAgTTTGGAGCCATC
TCCTCTGTGCTGAATGACATCCTGAGCAGACTGGACAAGGTGGAGGCTGAGGTCCAGATTGACAGACT
GATTACAGGCAGACTCCAATCCCTCCAAACCTATGTGACCCAACAACTTATCAGGGCTGCTGAGATTA
GGGCATCTGCCAACCTGGCTGCCACCAAGATGAGTGAGTGTGTGCTGGGACAAAGCAAGAGGGTGGAC
TTCTGTGGCAAGGGCTACCACCTGATGAGTTTTCCACAGTCTGCCCCTCATGGAGTGGTGTTCCTGCA
TGTGACCTATGTGCCTGCCCAGGAGAAGAACTTCACCACAGCCCCTGCCATCTGCCATGATGGCAAGG
CTCACTTTCCAAGGGAGGGAGTGTTTGTGAGCAATGGCACCCACTGGTTTGTGACCCAGAGGAACTTC
TATGAACCACAGATTATCACCACAGACAACACCTTTGTGTCTGGCAACTGTGATGTGGTGATTGGCAT
TGTGAACAACACAGTCTATGACCCACTCCAACCTGAACTGGACTCCTTCAAGGAGGAACTGGACAAAT
ACTTCAAGAACCACACCAGCCCTGATGTGGACCTGGGAGACATCTCTGGCATCAATGCCTCTGTGGTG
AACATCCAGAAGGAGATTGACAGACTGAATGAGGTGGCTAAGAACCTGAATGAGTCCCTGATTGACCT
CCAAGAACTGGGCAAATATGAACAATACATCAAGTGGCCATGGTACATCTGGCTGGGCTTCATTGCTG
GACTGATTGCCATTGTGATGGTGACCATAATGCTGTGTTGTATGACCTCCTGTTGTTCCTGTCTGAAA
GGCTGTTGTTCCTGTGGCTCCTGTTGTTGAggatccgagctcggtaccaagcttaagtttaaaccgct
gatcagcctcgactgtgccttctagttgccagccatctgttgtttgcccctcccccgtgccttccttg
accctggaaggtgccactcccactgtcctttcctaataaaatgaggaaattgcatcgcattgtctgag
taggtgtcattctattctggggggtggggtggggcaggacagcaagggggaggattgggaagacaata
gcaggcatgctggggatgcggtgggctctatggcttctgaggcggaaagaaccagctggggctctagg
gggtatccccacgcgccctgtagcggcgcattaagcgcggcgggtgtggtggttacgcgcagcgtgac
cgctacacttgccagcgccctagcgcccgctcctttcgctttcttcccttcctttctcgccacgttcg
ccggctttccccgtcaagctctaaatcgggggctccctttagggttccgatttagtgctttacggcac
ctcgaccccaaaaaacttgattagggtgatggttcacgtagtgggccatcgccctgatagacggtttt
tcgccctttgacgttggagtccacgttctttaatagtggactcttgttccaaactggaacaacactca
accctatctcggtctattcttttgatttataagggattttgccgatttcggcctattggttaaaaaat
gagctgatttaacaaaaatttaacgcgaattaattctgtggaatgtgtgtcagttagggtgtggaaag
tccccaggctccccagcaggcagaagtatgcaaagcatgcatctcaattagtcagcaaccaggtgtgg
aaagtccccaggctccccagcaggcagaagtatgcaaagcatgcatctcaattagtcagcaaccatag
tcccgcccctaactccgcccatcccgcccctaactccgcccagttccgcccattctccgccccatggc
tgactaattttttttatttatgcagaggccgaggccgcctctgcctctgagctattccagaagtagtg
aggaggcttttttggaggcctaggcttttgcaaaaagctcccgggagcttgtatatccattttcggat
ctgatcaagagacaggatgaggatcgtttcgcatgattgaacaagatggattgcacgcaggttctccg
gccgcttgggtggagaggctattcggctatgactgggcacaacagacaatcggctgctctgatgccgc
cgtgttccggctgtcagcgcaggggcgcccggttctttttgtcaagaccgacctgtccggtgccctga
atgaactgcaggacgaggcagcgcggctatcgtggctggccacgacgggcgttccttgcgcagctgtg
ctcgacgttgtcactgaagcgggaagggactggctgctattgggcgaagtgccggggcaggatctcct
gtcatctcaccttgctcctgccgagaaagtatccatcatggctgatgcaatgcggcggctgcatacgc
ttgatccggctacctgcccattcgaccaccaagcgaaacatcgcatcgagcgagcacgtactcggatg
gaagccggtcttgtcgatcaggatgatctggacgaagagcatcaggggctcgcgccagccgaactgtt
cgccaggctcaaggcgcgcatgcccgacggcgaggatctcgtcgtgacccatggcgatgcctgcttgc
cgaatatcatggtggaaaatggccgcttttctggattcatcgactgtggccggctgggtgtggcggac
cgctatcaggacatagcgttggctacccgtgatattgctgaagagcttggcggcgaatgggctgaccg
cttcctcgtgctttacggtatcgccgctcccgattcgcagcgcatcgccttctatcgccttcttgacg
agttcttctgagcgggactctggggttcgaaatgaccgaccaagcgacgcccaacctgccatcacgag
atttcgattccaccgccgccttctatgaaaggttgggcttcggaatcgttttccgggacgccggctgg
atgatcctccagcgcggggatctcatgctggagttcttcgcccaccccaacttgtttattgcagctta
taatggttacaaataaagcaatagcatcacaaatttcacaaataaagcatttttttcactgcattcta
gttgtggtttgtccaaactcatcaatgtatcttatcatgtctgtataccgtcgacctctagctagagc
ttggcgtaatcatggtcatagctgtttcctgtgtgaaattgttatccgctcacaattccacacaacat
acgagccggaagcataaagtgtaaagcctggggtgcctaatgagtgagctaactcacattaattgcgt
tgcgctcactgcccgctttccagtcgggaaacctgtcgtgccagctgcattaatgaatcggccaacgc
gcggggagaggcggtttgcgtattgggcgctcttccgcttcctcgctcactgactcgctgcgctcggt
cgttcggctgcggcgagcggtatcagctcactcaaaggcggtaatacggttatccacagaatcagggg
ataacgcaggaaagaacatgtgagcaaaaggccagcaaaaggccaggaaccgtaaaaaggccgcgttg
ctggcgtttttccataggctccgcccccctgacgagcatcacaaaaatcgacgctcaagtcagaggtg
gcgaaacccgacaggactataaagataccaggcgtttccccctggaagctccctcgtgcgctctcctg
ttccgaccctgccgcttaccggatacctgtccgcctttctcccttcgggaagcgtggcgctttctcat
agctcacgctgtaggtatctcagttcggtgtaggtcgttcgctccaagctgggctgtgtgcacgaacc
ccccgttcagcccgaccgctgcgccttatccggtaactatcgtcttgagtccaacccggtaagacacg
acttatcgccactggcagcagccactggtaacaggattagcagagcgaggtatgtaggcggtgctaca
gagttcttgaagtggtggcctaactacggctacactagaagaacagtatttggtatctgcgctctgct
gaagccagttaccttcggaaaaagagttggtagctcttgatccggcaaacaaaccaccgctggtagcg
gtggtttttttgtttgcaagcagcagattacgcgcagaaaaaaaggatctcaagaagatcctttgatc
ttttctacggggtctgacgctcagtggaacgaaaactcacgttaagggattttggtcatgagattatc
aaaaaggatcttcacctagatccttttaaattaaaaatgaagttttaaatcaatctaaagtatatatg
agtaaacttggtctgacagttaccaatgcttaatcagtgaggcacctatctcagcgatctgtctattt
cgttcatccatagttgcctgactccccgtcgtgtagataactacgatacgggagggcttaccatctgg
ccccagtgctgcaatgataccgcgagacccacgctcaccggctccagatttatcagcaataaaccagc
cagccggaagggccgagcgcagaagtggtcctgcaactttatccgcctccatccagtctattaattgt
tgccgggaagctagagtaagtagttcgccagttaatagtttgcgcaacgttgttgccattgctacagg
catcgtggtgtcacgctcgtcgtttggtatggcttcattcagctccggttcccaacgatcaaggcgag
ttacatgatcccccatgttgtgcaaaaaagcggttagctccttcggtcctccgatcgttgtcagaagt
aagttggccgcagtgttatcactcatggttatggcagcactgcataattctcttactgtcatgccatc
cgtaagatgcttttctgtgactggtgagtactcaaccaagtcattctgagaatagtgtatgcggcgac
cgagttgctcttgcccggcgtcaatacgggataataccgcgccacatagcagaactttaaaagtgctc
atcattggaaaacgttcttcggggcgaaaactctcaaggatcttaccgctgttgagatccagttcgat
gtaacccactcgtgcacccaactgatcttcagcatcttttactttcaccagcgtttctgggtgagcaa
aaacaggaaggcaaaatgccgcaaaaaagggaataagggcgacacggaaatgttgaatactcatactc
ttcctttttcaatattattgaagcatttatcagggttattgtctcatgagcggatacatatttgaatg
tatttagaaaaataaacaaataggggttccgcgcacatttccccgaaaagtgccacctgacgtc

### Results

[0375] As the immune protection conferred by first booster shot wanes over time and new Omicron subvariants emerge with stronger immune evasion, the need for variant-adapted coronavirus disease (COVID) vaccine booster is increasingly imminent. On Jun. 28, 2022 vaccine advisory committee of food and drug administration (FDA) voted in favor of updating COVID booster shot to add an Omicron component. However, the rapid displacement of dominant Omicron subvariants (from BA. 1 to BA.2, then BA.2.12.1 and now BA.4 and BA.5) poses a great challenge to update COVID vaccine targeting the fast-evolving variants while maintaining potency against circulating variants. Each former dominant Omicron strain, including BA.1, BA.2 and BA.2.12.1, drastically surges and subsides in a window of 3 months or even shorter. Omicron BA.4 and BA.5 subvariants emerge in April in Southern Africa and become dominant around the world since June this year. These Omicron sublineages quickly replace its predecessors in circumstances of existing herd immunity from vaccination or infection of past variants. Reinfection or breakthrough infection caused by new dominant variant is not uncommon due to its strong immune evasion, which complicates the redesign of new COVID boosters given the short time window of each Omicron wave and the lead time between design, validation, and deployment of new boosters.

[0376] It is a crucial question to ask that which variant based antigen(s) to use in the next generation COVID boosters to elicit potent and broad response to past, present and emerging variants. At the time this study was initiated, the then-dominant subvariant BA.2 was gradually replaced by BA.2.12.1, BA.4 and BA.5. Compared to BA.2 spike, BA.2.12.1 contains two additional mutations (L452Q and S704L) while BA.4 and BA.5 spikes are identical and have 4 constant alterations (Del69-70, L452R, F486V, R493Q) plus one mutation (N658S) seen in earlier sequences (FIG. 13A-13B). The L452 substitutions in BA.2.12.1 and BA.4/5 are associated with neutralizing antibody escape and BA.4/5 combines the L452R mutation initially identified in Delta variant, highlighting one possible evolution trajectory of emerging variant by combining predecessors' beneficial mutations.

[0377] Bivalent vaccine candidates have gained recent tractions due to the concept of direct targeting of two variants, which may also induce broader immunity against other variants. Bivalent vaccine candidates have been under active clinical testing such as Modern's mRNA-1273.214, which is a equal mixture of two spike-encoding mRNAs with 25 μg targeting ancestral SARS-CoV-2 and 25 μg targeting the original Omicron Variant (B.1.1.529) (Moderna news releases Jun. 8, 2022 Jun. 22, 2022, and FDA committee meeting Jun. 28, 2022), demonstrating the importance and the clinically relevance of the concept of bivalent vaccination using two mRNAs. Considering this merge of variants' mutations (FIGS. 13A-13B), these studies sought to determine if mRNA vaccine candidates based on antigens of circulating variant (BA.2) and/or former dominant variant (Delta) can mediate broad antibody response to emerging variants such as BA.2.12.1, BA.4 or BA.5. It is worth to explore in this direction for a few reasons. The lead time of combining boosters adapted to dominant and former dominant variants will be shorter than predicting and developing boosters targeting new variants. In addition, because of the rapid displacement of circulating variants, the mismatch between the strain used for updated boosters and emerging strain may always exists. How to elicit broad response to emerging variants using existing variant antigens is an inevitable question to answer when redesigning updated COVID boosters.

[0378] To answer this question, the antibody response elicited by ancestral (wild type, WT), Delta, BA.2 spike based monovalent or Delta & BA.2 bivalent mRNA boosters was compared to Omicron BA.2, BA.2.12.1 and BA.4/5 subvariants. In mice pre-immunized with two doses of WT lipid nanoparticle mRNA (LNP-mRNA), all three monovalent and one bivalent boosters elevated Omicron binding and neutralizing antibody titers to various degree in ELISA and pseudovirus neutralization assay (FIGS. 13C-13D and FIGS. 14-16), exemplifying the benefit of receiving WT or variant-adapted booster shots against circulating and emerging variants. Booster-associated titer ratios quantify booster's effect on antibody titers and were shown in each bar graph as post-booster titer on day 42 over pre-booster titer on day 28. Its dynamic range was greater in neutralization assay (ratio ranges from 3-23) than in ELISA (ratio ranges from 2-11).

[0379] Before administered with different boosters, 24 mice in four groups received same treatment and showed little or no significant difference in antibody titers measured on day 0 and day 28 (FIGS. 17-19 and 20A). A moderate increase in Omicron neutralizing antibody titers was observed from immunization of two doses of WT LNP-mRNA (FIG. 20B). This titer increase by WT LNP-mRNA was lowest in neutralization assay of BA.4/5 (˜40% increase) as compared to BA.2.12.1 and BA.2. On day 42 two weeks post booster, the binding and neutralizing titers of WT booster group were frequently found lower than those of variant booster groups (FIGS. 17 and 20A), consistent with the fact that BA.4/5 have stronger evasion of existing antibody therapeutics or vaccine induced immunity. Interestingly, compared to the neutralizing titers of BA.2 and BA.2.12.1, BA.2 monovalent but not Delta & BA.2 bivalent booster suffered a significant loss of BA.4/5 neutralizing titer (FIG. 20C), indicative of broader activity of bivalent booster and strong neutralization escape of Omicron BA.4 or BA.5 even in the BA.2 mRNA vaccinated individuals. The RBD and ECD binding antibody titers were well correlated and showed distinct linear regression models between day 28 and day 42 as well as in WT, Delta (right panel in FIG. 18) and Omicron antigen datasets (left panel). The upper right shift of day 42 linear segment suggested a titer increase by boosters while the lower left shift in Omicron antigen dataset was associated with antibody evasion of Omicron antigens.

[0380] The boosting effect of Delta and BA.2 specific monovalent or bivalent LNP-mRNAs is universally higher than that of WT LNP-mRNA, which only modestly increased antibody titer (˜1 fold, fold change=ratio-1) in neutralization assays of Omicron BA.5, BA.2.12.1 and BA.2 (FIG. 13D). The Delta & BA.2 bivalent booster showed superior performance of enhancing binding and neutralizing titers than either monovalent counterparts, which is especially apparent in neutralization of Omicron BA.4 or BA.5. The bivalent booster associated titer ratios were 23-, 16- and 7-fold for neutralization of BA.2, BA.2.12.1 and BA.4/5, respectively while Delta/BA.2 monovalent booster ratios were 10/12, 7/8, 4/3 respectively. The linear regression models of neutralizing and binding titers showed a trend of correlation, but the goodness of fit was low due to deviations intrinsic in the two assays as well as heterogeneity stemmed from distinct boosters and Omicron subvariants tested (FIG. 21).

[0381] To sum up, and without wishing to be bound by theory, these data delivered a few clear messages regarding the potency of boosters against Omicron subvariants: 1) either WT or variant, monovalent or bivalent boosters can improve antibody response to Omicron BA.2, BA.2.12.1 and BA.4/5, demonstrating the benefit and necessity of receiving booster shots; 2) the variant boosters with closer antigenic distance to circulating variant perform universally better than WT booster; 3) compared to monovalent booster, bivalent booster combining two genetically distant variants, Delta & BA.2 showed broader and numerically stronger antibody response to Omicron BA.2, BA.2.12.1 and BA.4/5 subvariants. Taken together, this study presents a direct evaluation of Delta and BA.2 variant-adapted monovalent and bivalent mRNA boosters and compares their antibody response to Omicron subvariants with WT booster in the context of mouse model pre-immunized with two-dose WT LNP-mRNA vaccination. These data provide pre-clinical evidence and rationale for developing bivalent or multi-valent variant targeted COVID boosters.

### Example 7: Development of a Multiplexed LNP-mRNA Vaccination Against Pathogenic Coronavirus Species

### Materials and Methods

[0382] Animals. M. musculus (mice), 6-8 weeks old females of C57BL/6Ncr were purchased from Charles River. M. musculus (mice) used for immunogenicity study. Animals were housed in individually ventilated cages in a dedicated vivarium with clean food, water, and bedding. Animals are housed with a maximum of 5 mice per cage, at regular ambient room temperature (65-75° F., or 18-23° C.), 40-60% humidity, and a 14 h: 10 h light cycle. All experiments utilize randomized littermate controls.

[0383] Cell Lines. HEK293T (ThermoFisher), Huh-7 and 293T-hACE2 (Dr Bieniasz′ lab) cell lines were cultured in complete growth medium, Dulbecco's modified Eagle's medium (DMEM; ThermoFisher) supplemented with 10% Fetal bovine serum (FBS, Hyclone), 1% penicillin-streptomycin (Gibco) (D10 media for short). Cells were typically passaged every 1-2 days at a split ratio of 1:2 or 1:4 when the confluency reached about 80%.

[0384] Mouse immunization. 6-8 weeks old female C57BL/6Ncr (B6) mice were purchased from Charles River and used for vaccine immunogenicity study. Animals were housed in individually ventilated cages in a dedicated vivarium with clean food, water, and bedding. A maximum of 5 mice was allowed in each cage, at regular ambient room temperature (65-75° F., or 18-23° C.), 40-60% humidity, and a 14 h: 10 h day/night cycle. All experiments utilize randomized littermate controls. A standard two-dose schedule given 21 days apart was adopted (Polack et al., 2020), unless otherwise noted. Three sets of immunization experiments were performed: Triplex dosage testing, MERS Duplex testing and Schedule comparison testing.

[0385] For the Triplex dosage testing experiment, 1 μg Delta LNP-mRNA, 1 μg or 3 μg Triplex-CoV LNP-mRNA (equal mass mixture of Delta, MERS and SARS mRNA) were diluted to the same volume with 1×PBS and inoculated into mice intramuscularly during prime and boost.

[0386] For the MERS Duplex testing experiment, 3 μg MERS LNP-mRNA, 3 μg equal-mass mRNA mixture of MERS+SARS or MERS+Delta spikes at same concentration were inoculated into mice intramuscularly during prime and boost.

[0387] For the Schedule comparison testing experiment, 1 μg Delta, MERS and SARS LNP-mRNA were sequentially inoculated into mice during prime and boost. Control mice received 50 μl PBS at prime and boost at the same matched time points in all experiments.

[0388] Coronavirus spike sequence alignment. The spike sequence used to produce the LNP-mRNA vaccines were aligned using Clustal Omega (Goujon et al., 2010) and visualized in Jalview (Waterhouse et al., 2009).

[0389] Plasmid construction. The spike cDNA of SARS-CoV (Genbank accession AAP13567.1) and MERS-CoV (Genbank accession AFS88936.1) were purchased from Sino Biological (Cat #VG40150-G-N and VG40069-G-N, respectively). cDNA of SARS-CoV-2 B.1.617.2 (Delta variant) (Liu et al., 2021) were synthesized as gBlocks (IDT). The spike sequences were cloned by Gibson Assembly (NEB) into pcDNA3.1 plasmid for the mRNA transcription and pseudovirus assay. The plasmids for the pseudotyped virus assay including pHIVNLGagPol and pCCNanoLuc2AEGFP are gifts from Dr. Bieniasz′ lab (Schmidt et al., 2020). The C-terminal 19 (for SARS-CoV and SARS-CoV-2) or 16 (for MERS-CoV) amino acids were deleted in the spike sequence for the pseudovirus assay. To improve expression and retain prefusion conformation, six prolines (HexaPro variant, 6P) (Wrapp et al., 2020) were introduced to the SARS-CoV-2, SARS-CoV and MERS-CoV spike sequence at the homologous sites in the mRNA transcription plasmids. The furin site of SARS-CoV-2 spike (RRAR) were replaced with a GSAS short stretch to keep S1 and S2 subunits connected in the spike.

[0390] In vitro mRNA transcription and vaccine formulation. Codon-optimized mRNA encoding HexaPro spikes of SARS-CoV-2 WT, Delta, SARS-CoV and MERS-CoV were synthesized in vitro using an Hiscribe™ T7 ARCA mRNA Kit (with tailing) (NEB, Cat #E2060S), with 50% replacement of uridine by N1-methyl-pseudouridine. A linearized DNA template containing the spike open reading frame flanked by 5′ untranslated region (UTR), 3′ UTR and 3′-end polyA tail was used as for mRNA transcription. The linearization of DNA templates was achieved by digesting circular plasmids with BbsI restriction enzyme, followed by gel purification.

[0391] The mRNA was synthesized and purified by following the manufacturer's instructions and kept frozen at −80° C. until further use. In brief, the synthesized mRNA was purified by spin column-based method using Monarch RNA cleanup kit (NEB, Cat No. T2040L). The mRNA was encapsulated in lipid nanoparticles using the NanoAssemblr® Ignite™ machine (Precision Nanosystems). For the MixCoV vaccine, equal mass of SARS, MERS and Delta spike mRNA were mixed before encapsulated by lipid nanoparticles. All procedures are following the guidance of manufacturers. In brief, GenVoy ILM lipid mixture was mixed with transcribed mRNA in the low pH formulation buffer 1 on Ignite instrument at a molar ratio of 6:1 (LNP: mRNA), similar to previously described (Corbett et al., 2020; Hassett et al., 2019). The Gen Voy ILM contains 50% PNI ionizable lipids, 10% DSPC, 37.5% cholesterol and 2.5% PNI stabilizer. The LNP encapsulated mRNA was buffer exchanged to PBS using 30 kDa Amicon filter (MilliporeSigma™ UFC901024). Sucrose was added as a cryoprotectant. The particle size of mRNA-LNP was determined by DLS machine (DynaPro NanoStar, Wyatt, WDPN-06) and TEM described below. The encapsulation rate and mRNA concentration were measured by Quant-iT™ RiboGreen™ RNA Assay (ThermoFisher).

[0392] In vitro mRNA expression and receptor binding validation of translated spikes HEK293T cells were electroporated with mRNA encoding SARS, MERS or Delta spikes using Neon™ Transfection System 10 μL Kit following the standard protocol provided by manufacturer. After 12 h, the cells were collected and resuspended. To detect surface-protein expression, the cells were stained with ACE2-Fc chimera (Genscript, Z03484) or DPP4-Fc (Sino Biological, 10688-H01H) in MACS buffer (D-PBS with 2 mM EDTA and 0.5% BSA) for 30 min on ice. Thereafter, cells were washed twice and incubated with PE-anti-human FC antibody (Biolegend, 410708) in MACS buffer for 30 min on ice. Data acquisition was performed on BD FACSAria II Cell Sorter (BD). Analysis was performed using FlowJo software.

[0393] Negative-stain TEM. 5 μl of the sample was deposited on a glow-discharged formvar/carbon-coated copper grid (Electron Microscopy Sciences, catalog number FCF400-Cu-50), incubated for 1 min and blotted away. The grid was washed briefly with 2% (w/v) uranyl formate (Electron Microscopy Sciences, catalog number 22450) and stained for 1 min with the same uranyl formate buffer. Images were acquired using a JEOL JEM-1400 Plus microscope with an acceleration voltage of 80 kV and a bottom-mount 4k×3k charge-coupled device camera (Advanced Microscopy Technologies, AMT).

[0394] Sample collection, plasma and PBMCs isolation At the defined time points, usually two weeks post the last dose of boost unless otherwise noted (e.g. day 35, or day 119, as noted in the schematics), blood was retro-orbitally collected from mice. The PBMCs and plasma were isolated from blood via SepMate-15 (StemCell Technologies). 200 μl blood was immediately diluted with 800 μl PBS with 2% FBS. The diluted blood was then added to SepMate-15 tubes with 5 ml Lymphoprep (StemCell Technologies). 1200×g centrifugation for 20 minutes was applied to isolate RBCs, PBMCs and plasma. 200 μl diluted plasma was collected from the surface layer. Then the solution at the top layer containing PBMCs was poured to a new tube. PBMCs were washed once with PBS+2% FBS before being used in downstream analysis. The separated plasma was used in ELISA and neutralization assay. PBMCs were collected for single cell profiling using a 10× Genomics platform.

[0395] ELISA. The 384-well ELISA plates were coated with 3 μg/ml of antigens overnight at 4 degree. The antigen panel used in the ELISA assay includes SARS-CoV-2 spike S1+S2 ECD and RBD of 2019-nCoV WT (Sino Biological, ECD 40589-V08B1 and RBD 40592-V08B), Delta variant B.1.617.2 (SINO, ECD 40589-V08B16 and RBD 40592-V08H90), SARS-CoV (ECD Sino Biological 40634-V08B and RBD Fisher 50-196-4017) and MERS-CoV (ECD Sino Biological and RBD Fisher 50-201-9463). Plates were washed with PBS plus 0.5% Tween 20 (PBST) three times using the 50TS microplate washer (Fisher Scientific, NC0611021) and blocked with 0.5% BSA in PBST at room temperature for one hour. Plasma was serially diluted twofold or fourfold starting at a 1:500 dilution. Samples were added to the coated plates and incubate at room temperature for one hour, followed by washes with PBST five times. Anti-mouse secondary antibody (Fisher, Cat #A-10677) was diluted to 1:2500 in blocking buffer and incubated at room temperature for one hour. Plates were washed five times and developed with tetramethylbenzidine substrate (Biolegend, 421101). The reaction was stopped with 1 M phosphoric acid, and OD at 450 nm was determined by multimode microplate reader (PerkinElmer En Vision 2105). The binding response (OD450) were plotted against the dilution factor in log 10 scale to display the dilution-dependent response. The area under curve of the dilution-dependent response (Log 10 AUC) was calculated to evaluate the potency of the serum antibody binding to spike antigens.

[0396] Blocking ELISA. 0.6 μg/ml ECDs of Delta (Sino 40589-V08B16), MERS (40069-V08B) and SARS (Sino 40634-V08B) were coated to 384-well plate at 4 degree overnight. Low-density antigen was coated in blocking ELISA to ensure the blocking effect can be observed. The coated plate was then washed with PBST (0.5% Tween-20) three times and blocked with 2% BSA in PBST for 1 hour at room temperature. Equal volume of blocking agents at 5 μg/ml was mixed with serially diluted plasma and incubated at room temperature for 30 min before added to the plate. The blocking agents include PBS as negative control, Delta ECD, SARS ECD or MERS ECD. The conditions used in blocking ELISA was based on the optimized competition ELISA conditions in our previous study (Fang et al., 2022). After 1 hour incubation with the plasma and blocking agents, the plate was washed with PBST 5 times and incubated with anti-mouse secondary antibody (Fisher, Cat #A-10677) for 1 hour. Then the plate was washed five times with PBST, developed with tetramethylbenzidine substrate and fixed with 1M phosphoric acid. The OD450 was quantified by multimode microplate reader (PerkinElmer En Vision 2105). The normalized blocking effect was calculated by normalizing the AUC reduction by blocking reagents with AUC difference between plasma samples of PBS and vaccination groups.

[0397] Pseudovirus neutralization assay. HIV-1 based SARS-CoV-2 WT, B.1.617.2 (delta) variant, SARS and MERS pseudotyped virions were generated using corresponding spike sequences, and applied in neutralization assays. The pseudotyped virus was packaged using a coronavirus spike plasmid, a reporter vector and a HIV-1 structural protein expression plasmid. The reporter vector, pCCNanoLuc2AEGFP, and HIV-1 structural/regulatory proteins (pHIVNLGagPol) expression plasmid were from Bieniasz lab. The spike plasmid for SARS-CoV-2 WT pseudovirus truncated 19 C-terminal amino acids of S protein (SARS-CoV-2-Δ19) and was from Bieniasz lab. Spike plasmids expressing C-terminally truncated SARS-CoV-2 B.1.617.2 variant S protein (Delta variant-Δ19), SARS-CoV S protein (SARS-CoV-Δ19) and MERS S protein (MERS-CoV-Δ16) were generated based on the pSARS-CoV-2-Δ19. Briefly, 293T cells were seeded in 150 mm plates, and transfected with 21 μg pHIVNLGagPol, 21 μg pCCNanoLuc2AEGFP, and 7.5 μg of corresponding spike plasmids, in the presence of 198 μl PEI. At 48 h after transfection, the 20-ml supernatant was harvested and filtered through a 0.45-μm filter, and concentrated before aliquoted and frozen in −80° C.

[0398] The SARS-CoV and SARS-CoV-2 pseudovirus neutralization assays were performed on 293T-hACE2 cell, while the MERS-CoV neutralization assay was performed on Huh-7 cells. One day before infection, 293T-hACE2 cells were plated in a 96 well plate with 0.01×106 cells per well. In the next day, plasma collected from PBS or LNP-mRNA immunized mice were 5-fold serially diluted with complete growth medium starting from 1:100. 55 μL aliquots of diluted plasma were mixed with the same volume of SARS-CoV-2 WT, Delta variant, SARS or MERS pseudovirus. The mixture was incubated for 1 hr in the 37° C. incubator, supplied with 5% CO2. Then 100 μL of mixtures were added into 96-well plates with 293T-hACE2 or Huh-7 cells. Plates were incubated at 37° C. for 48 hr. Then host cells were collected and the percent of GFP-positive cells were analyzed with Attune N×T Acoustic Focusing Cytometer (ThermoFisher). The 50% inhibitory concentration (IC50) was calculated with a four-parameter logistic regression using GraphPad Prism (GraphPad Software Inc.). If the curve of individual mouse fails to produce positive fit (i.e. negative titer), suggestive of no neutralization activity, the value was converted to zero.

[0399] Authentic virus neutralization assay. Mouse plasma samples were serially diluted, then incubated with SARS-CoV-2 isolate USA-WA1/2020 for 1 h at 37° C. Vero-E6 overexpressing ACE2/TMPRSS2 was added to the plasma/virus mixture such that the final MOI was 1. Cell viability was measured at 72 hpi using CellTiter Glo.

[0400] Correlation analysis. Correlation analysis of ELISA, pseudovirus neutralization and authentic virus neutralization data were performed using the respective data collected. Linear regression model was used to evaluate the correlations between ELISA RBD and ECD AUCs, pseudovirus neutralization and authentic virus neutralization log 10 IC50. Model fitting and statistical analysis were performed in Graphpad Prism9.1.2. Correlations of data points from either individual mouse, or group average of different vaccination groups, were analyzed separately. The vaccination-group ELISA AUC or neutralization log 10 IC50 were calculated from the average of individual value in each group. Due to assay-dependent PBS background level, only non-PBS data points were included in the correlation analysis.

[0401] Single cell RNA-seq. PBMCs were collected from mRNA-LNP vaccinated and control mice were collected as described above for mouse immunization and sample collection, and normalized to 1000 cells/μL. Standard volumes of cell suspension were loaded to achieve targeted cell recovery to 10000 cells. The samples were subjected to 14 cycles of cDNA amplification. Following this, gene expression (GEX) libraries were prepared according to the manufacturer's protocol (10× Genomics). All libraries were sequenced using a NovaSeq 6000 (Illumina) with 2*150 read length.

[0402] Single cell data analysis for immune repertoire profiling and transcriptomic signatures. Both standard established pipelines and custom scripts were used for processing and analyzing single cell GEX data. Illumina sequencing data was processed using the Cellranger v6.0.1 (10× Genomics) pipeline, aligning reads to the mm10 reference transcriptome and aggregating all samples. Cellranger outputs were then preprocessed using a modified Seurat v4.0.5 workflow with the R statistical programming language (Satija et al., 2015). Briefly, individual sample data sets were filtered for quality cells (200-2000 RNA features and <5% mitochondrial RNA), log-normalized, scaled, and quality features were selected to calculate low-dimensional “anchors” (reciprocal-PCR dimensional reduction, k=20, anchors=2000), which were used to integrate the different sample data sets (Stuart et al., 2019). Integrated single-cell data were scaled, centered, clustered by shared nearest neighbors graph (k=20, first 12 PCA dimensions, chosen by the elbow plot method) with modularity optimization (Louvain algorithm with multilevel refinement, empirically chosen resolution=0.31). Clustered cells were visualized in low-dimensional space by uniform manifold approximation and projection (UMAP; first 12 PCA dimensions) (McInnes et al., 2018), and clusters were labeled as immune cell types via canonical marker expression, based on scaled-mean expression and expression detection rate for the cluster. Immune cell subtypes were identified for B cells, plasma cells, activated CD4 T cells, and mononuclear myeloid cells by sub-setting the cells of each group, rescaling with mt-RNA % as a covariate, centering, UMAP dimensional reduction as before (first 14, 11, 16, and 10 PCA dimensions for B cells, plasma cells, activated CD4 T cells, and myeloid cells, respectively), and clustering was performed as previously described (empirically chosen modularity resolution=0.20, 0.10, 0.25, and 0.10 for B cells, plasma cells, activated CD4 T cells, and myeloid cells, respectively), but canonical marker genes were used as features. To show that the cell type populations displayed distinct transcriptional profiles, markers were identified for each cluster vs all other cells using Wilcoxon rank sum testing of scaled data (SeuratWrappers::RunPrestoAll R function), while down-sampling to 5000 cells per cluster. The top 10 mean log fold change genes were selected from each cell type to visualize by heatmap with hierarchical clustering.

[0403] Differential expression was performed using the edgeR analysis pipeline and quasi-likelihood (QL) F tests. Specifically, raw single-cell expression data was filtered to include genes with >5% detection rate across all cells, genes were TMM-normalized, fitted to a QL negative binomial generalized linear model using trended dispersion estimates with cell detection rate and treatment as covariates, and empirical Bayes QL F tests were performed with treatment as the coefficient equal to zero under the null hypothesis.

[0404] Pathway enrichment analyses were performed for differentially expressed genes (DEG; absolute log 2 (x+1) expression fold-change >0.5, FDR-adjusted p value (q)<0.01) using the gost function of the gProfiler2 R package with biological process gene ontologies (GO) for Mus musculus, an adjusted p value-ordered gene list, and known genes as the domain for the statistics. In addition, the analysis p values were adjusted for multiple testing using the gProfiler gSCS method. Results were filtered to include GO terms <=600 genes in size that intersected >2 DEG, an absolute activation score (mean log 2 (x+1) expression fold change of GO term DEGs)>0.5, and an adjusted p<0.01. Network analyses were performed by (1) creating network graphs with filtered pathway results as nodes and GO term similarity coefficients as edges (coefficients=50% jaccard+50% overlap scores; edge similarity threshold=0.375), (2) finding graph clusters via the Leiden algorithm using the modularity method with similarity coefficients as weights (resolution=0.5, iterations=1000), and (3) labeling clusters by their most significant GO term (meta-pathway). Meta-pathway genes were visualized by heatmap, using log-normalized, scaled expression for GO term genes that were differentially expressed in vaccination groups compared to the PBS control. Custom R scripts were used for generating various plots.

[0405] Before the COVID-19 pandemic, no effective vaccine had been approved to prevent spread of coronaviruses. Previous SARS and MERS vaccine devolvement, although at earlier stages, together with global efforts, led to rapid development of multiple COVID-19 vaccines against SARS-CoV-2. The most prominent and efficacious vaccine belong to the lipid nanoparticle (LNP) mRNA vaccine category, with the first two emergency use approval issued to Moderna and Pfizer-BioNTech mRNA vaccines. Although successful vaccines against SARS-CoV-2 have been developed to control COVID-19, no effective vaccines exist that can counter multiple pathogenic coronavirus species including SARS-CoV and MERS-CoV. Thus, it is important to develop multi-species coronavirus vaccines, not only to help fight the ongoing pandemic, but also to prevent reemergence of these previously existed dangerous pathogens, as well as to gain insights to prepare for future zoonotic pathogenic coronavirus outbreaks.

[0406] The success of LNP-mRNA vaccine against COVID-19 led to the natural hypothesis of multiplexed vaccination against multiple coronavirus species. In the studies presented herein, species-specific LNP-mRNA vaccine candidates were generated and tested either alone or in combination in vivo. LNP-mRNAs were generated specifically encoding the HexaPro engineered full-length spikes of SARS-CoV-2 Delta variant, SARS-CoV and MERS-CoV, and systematically studied their immune responses in animal models.

[0407] Standard statistics. Standard statistical methods were applied to non-high-throughput experimental data. The statistical methods are described in figure legends and/or supplementary Excel tables. The statistical significance was labeled as follows: n.s., not significant; * p<0.05; ** p<0.01; *** p<0.001; **** p<0.0001. Prism (GraphPad Software) and RStudio were used for these analyses. Additional information can be found in the supplemental excel tables.

PVP24 pcDNA3.1 Spike del19
(SEQ ID NO: 38)
gacggatcgggagatctcccgatcccctatggtgcactctcagtacaatctgctctgatgccgcatag
ttaagccagtatctgctccctgcttgtgtgttggaggtcgctgagtagtgcgcgagcaaaatttaagc
tacaacaaggcaaggcttgaccgacaattgcatgaagaatctgcttagggttaggcgttttgcgctgc
ttcgcgatgtacgggccagatatacgcgttgacattgattattgactagttattaatagtaatcaatt
acggggtcattagttcatagcccatatatggagttccgcgttacataacttacggtaaatggcccgcc
tggctgaccgcccaacgacccccgcccattgacgtcaataatgacgtatgttcccatagtaacgccaa
tagggactttccattgacgtcaatgggtggagtatttacggtaaactgcccacttggcagtacatcaa
gtgtatcatatgccaagtacgccccctattgacgtcaatgacggtaaatggcccgcctggcattatgc
ccagtacatgaccttatgggactttcctacttggcagtacatctacgtattagtcatcgctattacca
tggtgatgcggttttggcagtacatcaatgggcgtggatagcggtttgactcacggggatttccaagt
ctccaccccattgacgtcaatgggagtttgttttggcaccaaaatcaacgggactttccaaaatgtcg
taacaactccgccccattgacgcaaatgggcggtaggcgtgtacggtgggaggtctatataagcagag
ctctctggctaactagagaacccactgcttactggcttatcgaaattaatacgactcactatagggag
acccaagctggctagccaccATGTTTGTGTTCCTGGTGCTGCTGCCACTGGTGTCCAGCCAGTGTGTG
AACCTGACCACCAGGACCCAACTTCCTCCTGCCTACACCAACTCCTTCACCAGGGGAGTCTACTACCC
TGACAAGGTGTTCAGGTCCTCTGTGCTGCACAGCACCCAGGACCTGTTCCTGCCATTCTTCAGCAATG
TGACCTGGTTCCATGCCATCCATGTGTCTGGCACCAATGGCACCAAGAGGTTTGACAACCCTGTGCTG
CCATTCAATGATGGAGTCTACTTTGCCAGCACAGAGAAGAGCAACATCATCAGGGGCTGGATTTTTGG
CACCACCCTGGACAGCAAGACCCAGTCCCTGCTGATTGTGAACAATGCCACCAATGTGGTGATTAAGG
TGTGTGAGTTCCAGTTCTGTAATGACCCATTCCTGGGAGTCTACTACCACAAGAACAACAAGTCCTGG
ATGGAGTCTGAGTTCAGGGTCTACTCCTCTGCCAACAACTGTACCTTTGAATATGTGAGCCAACCATT
CCTGATGGACTTGGAGGGCAAGCAGGGCAACTTCAAGAACCTGAGGGAGTTTGTGTTCAAGAACATTG
ATGGCTACTTCAAGATTTACAGCAAACACACACCAATCAACCTGGTGAGGGACCTGCCACAGGGCTTC
TCTGCCTTGGAACCACTGGTGGACCTGCCAATTGGCATCAACATCACCAGGTTCCAGACCCTGCTGGC
TCTGCACAGGTCCTACCTGACACCTGGAGACTCCTCCTCTGGCTGGACAGCAGGAGCAGCAGCCTACT
ATGTGGGCTACCTCCAACCAAGGACCTTCCTGCTGAAATACAATGAGAATGGCACCATCACAGATGCT
GTGGACTGTGCCCTGGACCCACTGTCTGAGACCAAGTGTACCCTGAAATCCTTCACAGTGGAGAAGGG
CATCTACCAGACCAGCAACTTCAGGGTCCAACCAACAGAGAGCATTGTGAGGTTTCCAAACATCACCA
ACCTGTGTCCATTTGGAGAGGTGTTCAATGCCACCAGGTTTGCCTCTGTCTATGCCTGGAACAGGAAG
AGGATTAGCAACTGTGTGGCTGACTACTCTGTGCTCTACAACTCTGCCTCCTTCAGCACCTTCAAGTG
TTATGGAGTGAGCCCAACCAAACTGAATGACCTGTGTTTCACCAATGTCTATGCTGACTCCTTTGTGA
TTAGGGGAGATGAGGTGAGACAGATTGCCCCTGGACAAACAGGCAAGATTGCTGACTACAACTACAAA
CTGCCTGATGACTTCACAGGCTGTGTGATTGCCTGGAACAGCAACAACCTGGACAGCAAGGTGGGAGG
CAACTACAACTACCTCTACAGACTGTTCAGGAAGAGCAACCTGAAACCATTTGAGAGGGACATCAGCA
CAGAGATTTACCAGGCTGGCAGCACACCATGTAATGGAGTGGAGGGCTTCAACTGTTACTTTCCACTC
CAATCCTATGGCTTCCAACCAACCAATGGAGTGGGCTACCAACCATACAGGGTGGTGGTGCTGTCCTT
TGAACTGCTCCATGCCCCTGCCACAGTGTGTGGACCAAAGAAGAGCACCAACCTGGTGAAGAACAAGT
GTGTGAACTTCAACTTCAATGGACTGACAGGCACAGGAGTGCTGACAGAGAGCAACAAGAAGTTCCTG
CCATTCCAACAGTTTGGCAGGGACATTGCTGACACCACAGATGCTGTGAGGGACCCACAGACCTTGGA
GATTCTGGACATCACACCATGTTCCTTTGGAGGAGTGTCTGTGATTACACCTGGCACCAACACCAGCA
ACCAGGTGGCTGTGCTCTACCAGGATGTGAACTGTACTGAGGTGCCTGTGGCTATCCATGCTGACCAA
CTTACACCAACCTGGAGGGTCTACAGCACAGGCAGCAATGTGTTCCAGACCAGGGCTGGCTGTCTGAT
TGGAGCAGAGCATGTGAACAACTCCTATGAGTGTGACATCCCAATTGGAGCAGGCATCTGTGCCTCCT
ACCAGACCCAGACCAACAGCCCAAGGAGGGCAAGGTCTGTGGCAAGCCAGAGCATCATTGCCTACACA
ATGAGTCTGGGAGCAGAGAACTCTGTGGCTTACAGCAACAACAGCATTGCCATCCCAACCAACTTCAC
CATCTCTGTGACCACAGAGATTCTGCCTGTGAGTATGACCAAGACCTCTGTGGACTGTACAATGTATA
TCTGTGGAGACAGCACAGAGTGTAGCAACCTGCTGCTCCAATATGGCTCCTTCTGTACCCAACTTAAC
AGGGCTCTGACAGGCATTGCTGTGGAACAGGACAAGAACACCCAGGAGGTGTTTGCCCAGGTGAAGCA
GATTTACAAGACACCTCCAATCAAGGACTTTGGAGGCTTCAACTTCAGCCAGATTCTGCCTGACCCAA
GCAAGCCAAGCAAGAGGTCCTTCATTGAGGACCTGCTGTTCAACAAGGTGACCCTGGCTGATGCTGGC
TTCATCAAGCAATATGGAGACTGTCTGGGAGACATTGCTGCCAGGGACCTGATTTGTGCCCAGAAGTT
CAATGGACTGACAGTGCTGCCTCCACTGCTGACAGATGAGATGATTGCCCAATACACCTCTGCCCTGC
TGGCTGGCACCATCACCTCTGGCTGGACCTTTGGAGCAGGAGCAGCCCTCCAAATCCCATTTGCTATG
CAGATGGCTTACAGGTTCAATGGCATTGGAGTGACCCAGAATGTGCTCTATGAGAACCAGAAACTGAT
TGCCAACCAGTTCAACTCTGCCATTGGCAAGATTCAGGACTCCCTGTCCAGCACAGCCTCTGCCCTGG
GCAAACTCCAAGATGTGGTGAACCAGAATGCCCAGGCTCTGAACACCCTGGTGAAGCAACTTTCCAGC
AACTTTGGAGCCATCTCCTCTGTGCTGAATGACATCCTGAGCAGACTGGACAAGGTGGAGGCTGAGGT
CCAGATTGACAGACTGATTACAGGCAGACTCCAATCCCTCCAAACCTATGTGACCCAACAACTTATCA
GGGCTGCTGAGATTAGGGCATCTGCCAACCTGGCTGCCACCAAGATGAGTGAGTGTGTGCTGGGACAA
AGCAAGAGGGTGGACTTCTGTGGCAAGGGCTACCACCTGATGAGTTTTCCACAGTCTGCCCCTCATGG
AGTGGTGTTCCTGCATGTGACCTATGTGCCTGCCCAGGAGAAGAACTTCACCACAGCCCCTGCCATCT
GCCATGATGGCAAGGCTCACTTTCCAAGGGAGGGAGTGTTTGTGAGCAATGGCACCCACTGGTTTGTG
ACCCAGAGGAACTTCTATGAACCACAGATTATCACCACAGACAACACCTTTGTGTCTGGCAACTGTGA
TGTGGTGATTGGCATTGTGAACAACACAGTCTATGACCCACTCCAACCTGAACTGGACTCCTTCAAGG
AGGAACTGGACAAATACTTCAAGAACCACACCAGCCCTGATGTGGACCTGGGAGACATCTCTGGCATC
AATGCCTCTGTGGTGAACATCCAGAAGGAGATTGACAGACTGAATGAGGTGGCTAAGAACCTGAATGA
GTCCCTGATTGACCTCCAAGAACTGGGCAAATATGAACAATACATCAAGTGGCCATGGTACATCTGGC
TGGGCTTCATTGCTGGACTGATTGCCATTGTGATGGTGACCATAATGCTGTGTTGTATGACCTCCTGT
TGTTCCTGTCTGAAAGGCTGTTGTTCCTGTGGCTCCTGTTGTTGAggatccgagctcggtaccaagct
taagtttaaaccgctgatcagcctcgactgtgccttctagttgccagccatctgttgtttgcccctcc
cccgtgccttccttgaccctggaaggtgccactcccactgtcctttcctaataaaatgaggaaattgc
atcgcattgtctgagtaggtgtcattctattctggggggtggggggggcaggacagcaagggggagg
attgggaagacaatagcaggcatgctggggatgcggtgggctctatggcttctgaggcggaaagaacc
agctggggctctagggggtatccccacgcgccctgtagcggcgcattaagcgcggcgggtgtggtggt
tacgcgcagcgtgaccgctacacttgccagcgccctagcgcccgctcctttcgctttcttcccttcct
ttctcgccacgttcgccggctttccccgtcaagctctaaatcgggggctccctttagggttccgattt
agtgctttacggcacctcgaccccaaaaaacttgattagggtgatggttcacgtagtgggccatcgcc
ctgatagacggtttttcgccctttgacgttggagtccacgttctttaatagtggactcttgttccaaa
ctggaacaacactcaaccctatctcggtctattcttttgatttataagggattttgccgatttcggcc
tattggttaaaaaatgagctgatttaacaaaaatttaacgcgaattaattctgtggaatgtgtgtcag
ttagggtgtggaaagtccccaggctccccagcaggcagaagtatgcaaagcatgcatctcaattagtc
agcaaccaggtgtggaaagtccccaggctccccagcaggcagaagtatgcaaagcatgcatctcaatt
agtcagcaaccatagtcccgcccctaactccgcccatcccgcccctaactccgcccagttccgcccat
tctccgccccatggctgactaattttttttatttatgcagaggccgaggccgcctctgcctctgagct
attccagaagtagtgaggaggcttttttggaggcctaggcttttgcaaaaagctcccgggagcttgta
tatccattttcggatctgatcaagagacaggatgaggatcgtttcgcatgattgaacaagatggattg
cacgcaggttctccggccgcttgggtggagaggctattcggctatgactgggcacaacagacaatcgg
ctgctctgatgccgccgtgttccggctgtcagcgcaggggcgcccggttctttttgtcaagaccgacc
tgtccggtgccctgaatgaactgcaggacgaggcagcgcggctatcgtggctggccacgacgggcgtt
ccttgcgcagctgtgctcgacgttgtcactgaagcgggaagggactggctgctattgggcgaagtgcc
ggggcaggatctcctgtcatctcaccttgctcctgccgagaaagtatccatcatggctgatgcaatgc
ggcggctgcatacgcttgatccggctacctgcccattcgaccaccaagcgaaacatcgcatcgagcga
gcacgtactcggatggaagccggtcttgtcgatcaggatgatctggacgaagagcatcaggggctcgc
gccagccgaactgttcgccaggctcaaggcgcgcatgcccgacggcgaggatctcgtcgtgacccatg
gcgatgcctgcttgccgaatatcatggtggaaaatggccgcttttctggattcatcgactgtggccgg
ctgggtgtggcggaccgctatcaggacatagcgttggctacccgtgatattgctgaagagcttggcgg
cgaatgggctgaccgcttcctcgtgctttacggtatcgccgctcccgattcgcagcgcatcgccttct
atcgccttcttgacgagttcttctgagcgggactctggggttcgaaatgaccgaccaagcgacgccca
acctgccatcacgagatttcgattccaccgccgccttctatgaaaggttgggcttcggaatcgttttc
cgggacgccggctggatgatcctccagcgcggggatctcatgctggagttcttcgcccaccccaactt
gtttattgcagcttataatggttacaaataaagcaatagcatcacaaatttcacaaataaagcatttt
tttcactgcattctagttgtggtttgtccaaactcatcaatgtatcttatcatgtctgtataccgtcg
acctctagctagagcttggcgtaatcatggtcatagctgtttcctgtgtgaaattgttatccgctcac
aattccacacaacatacgagccggaagcataaagtgtaaagcctggggtgcctaatgagtgagctaac
tcacattaattgcgttgcgctcactgcccgctttccagtcgggaaacctgtcgtgccagctgcattaa
tgaatcggccaacgcgcggggagaggcggtttgcgtattgggcgctcttccgcttcctcgctcactga
ctcgctgcgctcggtcgttcggctgcggcgagcggtatcagctcactcaaaggcggtaatacggttat
ccacagaatcaggggataacgcaggaaagaacatgtgagcaaaaggccagcaaaaggccaggaaccgt
aaaaaggccgcgttgctggcgtttttccataggctccgcccccctgacgagcatcacaaaaatcgacg
ctcaagtcagaggtggcgaaacccgacaggactataaagataccaggcgtttccccctggaagctccc
tcgtgcgctctcctgttccgaccctgccgcttaccggatacctgtccgcctttctcccttcgggaagc
gtggcgctttctcatagctcacgctgtaggtatctcagttcggtgtaggtcgttcgctccaagctggg
ctgtgtgcacgaaccccccgttcagcccgaccgctgcgccttatccggtaactatcgtcttgagtcca
acccggtaagacacgacttatcgccactggcagcagccactggtaacaggattagcagagcgaggtat
gtaggcggtgctacagagttcttgaagtggtggcctaactacggctacactagaagaacagtatttgg
tatctgcgctctgctgaagccagttaccttcggaaaaagagttggtagctcttgatccggcaaacaaa
ccaccgctggtagcggtggtttttttgtttgcaagcagcagattacgcgcagaaaaaaaggatctcaa
gaagatcctttgatcttttctacggggtctgacgctcagtggaacgaaaactcacgttaagggatttt
ggtcatgagattatcaaaaaggatcttcacctagatccttttaaattaaaaatgaagttttaaatcaa
tctaaagtatatatgagtaaacttggtctgacagttaccaatgcttaatcagtgaggcacctatctca
gcgatctgtctatttcgttcatccatagttgcctgactccccgtcgtgtagataactacgatacggga
gggcttaccatctggccccagtgctgcaatgataccgcgagacccacgctcaccggctccagatttat
cagcaataaaccagccagccggaagggccgagcgcagaagtggtcctgcaactttatccgcctccatc
cagtctattaattgttgccgggaagctagagtaagtagttcgccagttaatagtttgcgcaacgttgt
tgccattgctacaggcatcgtggtgtcacgctcgtcgtttggtatggcttcattcagctccggttccc
aacgatcaaggcgagttacatgatcccccatgttgtgcaaaaaagcggttagctccttcggtcctccg
atcgttgtcagaagtaagttggccgcagtgttatcactcatggttatggcagcactgcataattctct
tactgtcatgccatccgtaagatgcttttctgtgactggtgagtactcaaccaagtcattctgagaat
agtgtatgcggcgaccgagttgctcttgcccggcgtcaatacgggataataccgcgccacatagcaga
actttaaaagtgctcatcattggaaaacgttcttcggggcgaaaactctcaaggatcttaccgctgtt
gagatccagttcgatgtaacccactcgtgcacccaactgatcttcagcatcttttactttcaccagcg
tttctgggtgagcaaaaacaggaaggcaaaatgccgcaaaaaagggaataagggcgacacggaaatgt
tgaatactcatactcttcctttttcaatattattgaagcatttatcagggttattgtctcatgagcgg
atacatatttgaatgtatttagaaaaataaacaaataggggttccgcgcacatttccccgaaaagtgc
cacctgacgtc
PVP31b pcDNA3.1 Spike Hexapro
(SEQ ID NO: 39)
gacggatcgggagatctcccgatcccctatggtgcactctcagtacaatctgctctgatgccgcatag
ttaagccagtatctgctccctgcttgtgtgttggaggtcgctgagtagtgcgcgagcaaaatttaagc
tacaacaaggcaaggcttgaccgacaattgcatgaagaatctgcttagggttaggcgttttgcgctgc
ttcgcgatgtacgggccagatatacgcgttgacattgattattgactagttattaatagtaatcaatt
acggggtcattagttcatagcccatatatggagttccgcgttacataacttacggtaaatggcccgcc
tggctgaccgcccaacgacccccgcccattgacgtcaataatgacgtatgttcccatagtaacgccaa
tagggactttccattgacgtcaatgggtggagtatttacggtaaactgcccacttggcagtacatcaa
gtgtatcatatgccaagtacgccccctattgacgtcaatgacggtaaatggcccgcctggcattatgc
ccagtacatgaccttatgggactttcctacttggcagtacatctacgtattagtcatcgctattacca
tggtgatgcggttttggcagtacatcaatgggcgtggatagcggtttgactcacggggatttccaagt
ctccaccccattgacgtcaatgggagtttgttttggcaccaaaatcaacgggactttccaaaatgtcg
taacaactccgccccattgacgcaaatgggcggtaggcgtgtacggtgggaggtctatataagcagag
ctctctggctaactagagaacccactgcttactggcttatcgaaattaatacgactcactatagggag
acccaagctggctagccaccGAGAATAAACTAGTATTCTTCTGGTCCCCACAGACTCAGAGAGAACCC
GCCACCATgTTTGTGTTCCTGGTGCTGCTGCCACTGGTGTCCAGCCAGTGTGTGAACCTGACCACCAG
GACCCAACTTCCTCCTGCCTACACCAACTCCTTCACCAGGGGAGTCTACTACCCTGACAAGGTGTTCA
GGTCCTCTGTGCTGCACAGCACCCAGGACCTGTTCCTGCCATTCTTCAGCAATGTGACCTGGTTCCAT
GCCATCCATGTGTCTGGCACCAATGGCACCAAGAGGTTTGACAACCCTGTGCTGCCATTCAATGATGG
AGTCTACTTTGCCAGCACAGAGAAGAGCAACATCATCAGGGGCTGGATTTTTGGCACCACCCTGGACA
GCAAGACCCAGTCCCTGCTGATTGTGAACAATGCCACCAATGTGGTGATTAAGGTGTGTGAGTTCCAG
TTCTGTAATGACCCATTCCTGGGAGTCTACTACCACAAGAACAACAAGTCCTGGATGGAGTCTGAGTT
CAGGGTCTACTCCTCTGCCAACAACTGTACCTTTGAATATGTGAGCCAACCATTCCTGATGGACTTGG
AGGGCAAGCAGGGCAACTTCAAGAACCTGAGGGAGTTTGTGTTCAAGAACATTGATGGCTACTTCAAG
ATTTACAGCAAACACACACCAATCAACCTGGTGAGGGACCTGCCACAGGGCTTCTCTGCCTTGGAACC
ACTGGTGGACCTGCCAATTGGCATCAACATCACCAGGTTCCAGACCCTGCTGGCTCTGCACAGGTCCT
ACCTGACACCTGGAGACTCCTCCTCTGGCTGGACAGCAGGAGCAGCAGCCTACTATGTGGGCTACCTC
CAACCAAGGACCTTCCTGCTGAAATACAATGAGAATGGCACCATCACAGATGCTGTGGACTGTGCCCT
GGACCCACTGTCTGAGACCAAGTGTACCCTGAAATCCTTCACAGTGGAGAAGGGCATCTACCAGACCA
GCAACTTCAGGGTCCAACCAACAGAGAGCATTGTGAGGTTTCCAAACATCACCAACCTGTGTCCATTT
GGAGAGGTGTTCAATGCCACCAGGTTTGCCTCTGTCTATGCCTGGAACAGGAAGAGGATTAGCAACTG
TGTGGCTGACTACTCTGTGCTCTACAACTCTGCCTCCTTCAGCACCTTCAAGTGTTATGGAGTGAGCC
CAACCAAACTGAATGACCTGTGTTTCACCAATGTCTATGCTGACTCCTTTGTGATTAGGGGAGATGAG
GTGAGACAGATTGCCCCTGGACAAACAGGCAAGATTGCTGACTACAACTACAAACTGCCTGATGACTT
CACAGGCTGTGTGATTGCCTGGAACAGCAACAACCTGGACAGCAAGGTGGGAGGCAACTACAACTACC
TCTACAGACTGTTCAGGAAGAGCAACCTGAAACCATTTGAGAGGGACATCAGCACAGAGATTTACCAG
GCTGGCAGCACACCATGTAATGGAGTGGAGGGCTTCAACTGTTACTTTCCACTCCAATCCTATGGCTT
CCAACCAACCAATGGAGTGGGCTACCAACCATACAGGGTGGTGGTGCTGTCCTTTGAACTGCTCCATG
CCCCTGCCACAGTGTGTGGACCAAAGAAGAGCACCAACCTGGTGAAGAACAAGTGTGTGAACTTCAAC
TTCAATGGACTGACAGGCACAGGAGTGCTGACAGAGAGCAACAAGAAGTTCCTGCCATTCCAACAGTT
TGGCAGGGACATTGCTGACACCACAGATGCTGTGAGGGACCCACAGACCTTGGAGATTCTGGACATCA
CACCATGTTCCTTTGGAGGAGTGTCTGTGATTACACCTGGCACCAACACCAGCAACCAGGTGGCTGTG
CTCTACCAGGATGTGAACTGTACTGAGGTGCCTGTGGCTATCCATGCTGACCAACTTACACCAACCTG
GAGGGTCTACAGCACAGGCAGCAATGTGTTCCAGACCAGGGCTGGCTGTCTGATTGGAGCAGAGCATG
TGAACAACTCCTATGAGTGTGACATCCCAATTGGAGCAGGCATCTGTGCCTCCTACCAGACCCAGACC
AACAGCCCAGGCTCTGCATCTTCTGTGGCAAGCCAGAGCATCATTGCCTACACAATGAGTCTGGGAGC
AGAGAACTCTGTGGCTTACAGCAACAACAGCATTGCCATCCCAACCAACTTCACCATCTCTGTGACCA
CAGAGATTCTGCCTGTGAGTATGACCAAGACCTCTGTGGACTGTACAATGTATATCTGTGGAGACAGC
ACAGAGTGTAGCAACCTGCTGCTCCAATATGGCTCCTTCTGTACCCAACTTAACAGGGCTCTGACAGG
CATTGCTGTGGAACAGGACAAGAACACCCAGGAGGTGTTTGCCCAGGTGAAGCAGATTTACAAGACAC
CTCCAATCAAGGACTTTGGAGGCTTCAACTTCAGCCAGATTCTGCCTGACCCAAGCAAGCCAAGCAAG
AGGTCCCCTATTGAGGACCTGCTGTTCAACAAGGTGACCCTGGCTGATGCTGGCTTCATCAAGCAATA
TGGAGACTGTCTGGGAGACATTGCTGCCAGGGACCTGATTTGTGCCCAGAAGTTCAATGGACTGACAG
TGCTGCCTCCACTGCTGACAGATGAGATGATTGCCCAATACACCTCTGCCCTGCTGGCTGGCACCATC
ACCTCTGGCTGGACCTTTGGAGCAGGACCAGCCCTCCAAATCCCATTTCCAATGCAGATGGCTTACAG
GTTCAATGGCATTGGAGTGACCCAGAATGTGCTCTATGAGAACCAGAAACTGATTGCCAACCAGTTCA
ACTCTGCCATTGGCAAGATTCAGGACTCCCTGTCCAGCACACCATCTGCCCTGGGCAAACTCCAAGAT
GTGGTGAACCAGAATGCCCAGGCTCTGAACACCCTGGTGAAGCAACTTTCCAGCAACTTTGGAGCCAT
CTCCTCTGTGCTGAATGACATCCTGAGCAGACTGGACCCACCAGAGGCTGAGGTCCAGATTGACAGAC
TGATTACAGGCAGACTCCAATCCCTCCAAACCTATGTGACCCAACAACTTATCAGGGCTGCTGAGATT
AGGGCATCTGCCAACCTGGCTGCCACCAAGATGAGTGAGTGTGTGCTGGGACAAAGCAAGAGGGTGGA
CTTCTGTGGCAAGGGCTACCACCTGATGAGTTTTCCACAGTCTGCCCCTCATGGAGTGGTGTTCCTGC
ATGTGACCTATGTGCCTGCCCAGGAGAAGAACTTCACCACAGCCCCTGCCATCTGCCATGATGGCAAG
GCTCACTTTCCAAGGGAGGGAGTGTTTGTGAGCAATGGCACCCACTGGTTTGTGACCCAGAGGAACTT
CTATGAACCACAGATTATCACCACAGACAACACCTTTGTGTCTGGCAACTGTGATGTGGTGATTGGCA
TTGTGAACAACACAGTCTATGACCCACTCCAACCTGAACTGGACTCCTTCAAGGAGGAACTGGACAAA
TACTTCAAGAACCACACCAGCCCTGATGTGGACCTGGGAGACATCTCTGGCATCAATGCCTCTGTGGT
GAACATCCAGAAGGAGATTGACAGACTGAATGAGGTGGCTAAGAACCTGAATGAGTCCCTGATTGACC
TCCAAGAACTGGGCAAATATGAACAATACATCAAGTGGCCATGGTACATCTGGCTGGGCTTCATTGCT
GGACTGATTGCCATTGTGATGGTGACCATAATGCTGTGTTGTATGACCTCCTGTTGTTCCTGTCTGAA
AGGCTGTTGTTCCTGTGGCTCCTGTTGTAAGTTTGATGAGGATGACTCTGAACCTGTGCTGAAAGGAG
TGAAACTGCACTACACCTGACTCGAGCTGGTACTGCATGCACGCAATGCTAGCTGCCCCTTTCCCGTC
CTGGGTACCCCGAGTCTCCCCCGACCTCGGGTCCCAGGTATGCTCCCACCTCCACCTGCCCCACTCAC
CACCTCTGCTAGTTCCAGACACCTCCCAAGCACGCAGCAATGCAGCTCAAAACGCTTAGCCTAGCCAC
ACCCCCACGGGAAACAGCAGTGATTAACCTTTAGCAATAAACGAAAGTTTAACTAAGCTATACTAACC
CCAGGGTTGGTCAATTTCGTGCCAGCCACACCCTGGAGCTAGCaaaccgctgatcagcctcgactgtg
ccttctagttgccagccatctgttgtttgcccctcccccgtgccttccttgaccctggaaggtgccac
tcccactgtcctttcctaataaaatgaggaaattgcatcgcattgtctgagtaggtgtcattctattc
tggggggtggggtggggcaggacagcaagggggaggattgggaagacaatagcaggcatgctggggat
gcggtgggctctatggcttctgaggcggaaagaaccagctggggctctagggggtatccccacgcgcc
ctgtagcggcgcattaagcgcggcgggtgtggtggttacgcgcagcgtgaccgctacacttgccagcg
ccctagcgcccgctcctttcgctttcttcccttcctttctcgccacgttcgccggctttccccgtcaa
gctctaaatcgggggctccctttagggttccgatttagtgctttacggcacctcgaccccaaaaaact
tgattagggtgatggttcacgtagtgggccatcgccctgatagacggtttttcgccctttgacgttgg
agtccacgttctttaatagtggactcttgttccaaactggaacaacactcaaccctatctcggtctat
tcttttgatttataagggattttgccgatttcggcctattggttaaaaaatgagctgatttaacaaaa
atttaacgcgaattaattctgtggaatgtgtgtcagttagggtgtggaaagtccccaggctccccagc
aggcagaagtatgcaaagcatgcatctcaattagtcagcaaccaggtgtggaaagtccccaggctccc
cagcaggcagaagtatgcaaagcatgcatctcaattagtcagcaaccatagtcccgcccctaactccg
cccatcccgcccctaactccgcccagttccgcccattctccgccccatggctgactaattttttttat
ttatgcagaggccgaggccgcctctgcctctgagctattccagaagtagtgaggaggcttttttggag
gcctaggcttttgcaaaaagctcccgggagcttgtatatccattttcggatctgatcaagagacagga
tgaggatcgtttcgcatgattgaacaagatggattgcacgcaggttctccggccgcttgggtggagag
gctattcggctatgactgggcacaacagacaatcggctgctctgatgccgccgtgttccggctgtcag
cgcaggggcgcccggttctttttgtcaagaccgacctgtccggtgccctgaatgaactgcaggacgag
gcagcgcggctatcgtggctggccacgacgggcgttccttgcgcagctgtgctcgacgttgtcactga
agcgggaagggactggctgctattgggcgaagtgccggggcaggatctcctgtcatctcaccttgctc
ctgccgagaaagtatccatcatggctgatgcaatgcggcggctgcatacgcttgatccggctacctgc
ccattcgaccaccaagcgaaacatcgcatcgagcgagcacgtactcggatggaagccggtcttgtcga
tcaggatgatctggacgaagagcatcaggggctcgcgccagccgaactgttcgccaggctcaaggcgc
gcatgcccgacggcgaggatctcgtcgtgacccatggcgatgcctgcttgccgaatatcatggtggaa
aatggccgcttttctggattcatcgactgtggccggctgggtgtggcggaccgctatcaggacatagc
gttggctacccgtgatattgctgaagagcttggcggcgaatgggctgaccgcttcctcgtgctttacg
gtatcgccgctcccgattcgcagcgcatcgccttctatcgccttcttgacgagttcttctgagcggga
ctctggggttcgaaatgaccgaccaagcgacgcccaacctgccatcacgagatttcgattccaccgcc
gccttctatgaaaggttgggcttcggaatcgttttccgggacgccggctggatgatcctccagcgcgg
ggatctcatgctggagttcttcgcccaccccaacttgtttattgcagcttataatggttacaaataaa
gcaatagcatcacaaatttcacaaataaagcatttttttcactgcattctagttgtggtttgtccaaa
ctcatcaatgtatcttatcatgtctgtataccgtcgacctctagctagagcttggcgtaatcatggtc
atagctgtttcctgtgtgaaattgttatccgctcacaattccacacaacatacgagccggaagcataa
agtgtaaagcctggggtgcctaatgagtgagctaactcacattaattgcgttgcgctcactgcccgct
ttccagtcgggaaacctgtcgtgccagctgcattaatgaatcggccaacgcgcggggagaggcggttt
gcgtattgggcgctcttccgcttcctcgctcactgactcgctgcgctcggtcgttcggctgcggcgag
cggtatcagctcactcaaaggcggtaatacggttatccacagaatcaggggataacgcaggaaagaac
atgtgagcaaaaggccagcaaaaggccaggaaccgtaaaaaggccgcgttgctggcgtttttccatag
gctccgcccccctgacgagcatcacaaaaatcgacgctcaagtcagaggtggcgaaacccgacaggac
tataaagataccaggcgtttccccctggaagctccctcgtgcgctctcctgttccgaccctgccgctt
accggatacctgtccgcctttctcccttcgggaagcgtggcgctttctcatagctcacgctgtaggta
tctcagttcggtgtaggtcgttcgctccaagctgggctgtgtgcacgaaccccccgttcagcccgacc
gctgcgccttatccggtaactatcgtcttgagtccaacccggtaagacacgacttatcgccactggca
gcagccactggtaacaggattagcagagcgaggtatgtaggcggtgctacagagttcttgaagtggtg
gcctaactacggctacactagaagaacagtatttggtatctgcgctctgctgaagccagttaccttcg
gaaaaagagttggtagctcttgatccggcaaacaaaccaccgctggtagcggtggtttttttgtttgc
aagcagcagattacgcgcagaaaaaaaggatctcaagaagatcctttgatcttttctacggggtctga
cgctcagtggaacgaaaactcacgttaagggattttggtcatgagattatcaaaaaggatcttcacct
agatccttttaaattaaaaatgaagttttaaatcaatctaaagtatatatgagtaaacttggtctgac
agttaccaatgcttaatcagtgaggcacctatctcagcgatctgtctatttcgttcatccatagttgc
ctgactccccgtcgtgtagataactacgatacgggagggcttaccatctggccccagtgctgcaatga
taccgcgagacccacgctcaccggctccagatttatcagcaataaaccagccagccggaagggccgag
cgcagaagtggtcctgcaactttatccgcctccatccagtctattaattgttgccgggaagctagagt
aagtagttcgccagttaatagtttgcgcaacgttgttgccattgctacaggcatcgtggtgtcacgct
cgtcgtttggtatggcttcattcagctccggttcccaacgatcaaggcgagttacatgatcccccatg
ttgtgcaaaaaagcggttagctccttcggtcctccgatcgttgtcagaagtaagttggccgcagtgtt
atcactcatggttatggcagcactgcataattctcttactgtcatgccatccgtaagatgcttttctg
tgactggtgagtactcaaccaagtcattctgagaatagtgtatgcggcgaccgagttgctcttgcccg
gcgtcaatacgggataataccgcgccacatagcagaactttaaaagtgctcatcattggaaaacgttc
ttcggggcgaaaactctcaaggatcttaccgctgttgagatccagttcgatgtaacccactcgtgcac
ccaactgatcttcagcatcttttactttcaccagcgtttctgggtgagcaaaaacaggaaggcaaaat
gccgcaaaaaagggaataagggcgacacggaaatgttgaatactcatactcttcctttttcaatatta
ttgaagcatttatcagggttattgtctcatgagcggatacatatttgaatgtatttagaaaaataaac
aaataggggttccgcgcacatttccccgaaaagtgccacctgacgtc
PVP33b SARSCOV UTR Hexapro
(SEQ ID NO: 40)
gacggatcgggagatctcccgatcccctatggtgcactctcagtacaatctgctctgatgccgcatag
ttaagccagtatctgctccctgcttgtgtgttggaggtcgctgagtagtgcgcgagcaaaatttaagc
tacaacaaggcaaggcttgaccgacaattgcatgaagaatctgcttagggttaggcgttttgcgctgc
ttcgcgatgtacgggccagatatacgcgttgacattgattattgactagttattaatagtaatcaatt
acggggtcattagttcatagcccatatatggagttccgcgttacataacttacggtaaatggcccgcc
tggctgaccgcccaacgacccccgcccattgacgtcaataatgacgtatgttcccatagtaacgccaa
tagggactttccattgacgtcaatgggtggagtatttacggtaaactgcccacttggcagtacatcaa
gtgtatcatatgccaagtacgccccctattgacgtcaatgacggtaaatggcccgcctggcattatgc
ccagtacatgaccttatgggactttcctacttggcagtacatctacgtattagtcatcgctattacca
tggtgatgcggttttggcagtacatcaatgggcgtggatagcggtttgactcacggggatttccaagt
ctccaccccattgacgtcaatgggagtttgttttggcaccaaaatcaacgggactttccaaaatgtcg
taacaactccgccccattgacgcaaatgggcggtaggcgtgtacggtgggaggtctatataagcagag
ctctctggctaactagagaacccactgcttactggcttatcgaaattaatacgactcactatagggag
acccaagctggctagccaccGAGAATAAACTAGTATTCTTCTGGTCCCCACAGACTCAGAGAGAACCC
GCCACCATgTTCATCTTCCTGCTGTTCCTGACCCTGACCTCTGGCTCTGACCTGGACAGGTGTACCAC
CTTTGATGATGTCCAGGCTCCAAACTACACCCAACACACCTCCAGTATGAGGGGAGTCTACTACCCTG
ATGAGATTTTCAGGTCTGACACCCTCTACCTGACCCAGGACCTGTTCCTGCCATTCTACAGCAATGTG
ACAGGCTTCCACACCATCAACCACACCTTTGACAACCCTGTGATTCCATTCAAGGATGGCATCTACTT
TGCTGCCACAGAGAAGAGCAATGTGGTGAGGGGCTGGGTGTTTGGCAGCACAATGAACAACAAGAGCC
AGTCTGTGATTATCATCAACAACAGCACCAATGTGGTGATTAGGGCTTGTAACTTTGAACTGTGTGAC
AACCCATTCTTTGCTGTGAGCAAGCCTATGGGCACCCAGACCCACACAATGATTTTTGACAATGCCTT
CAACTGTACCTTTGAATACATCTCTGATGCCTTCTCCCTGGATGTGTCTGAGAAGTCTGGCAACTTCA
AACACCTGAGGGAGTTTGTGTTCAAGAACAAGGATGGCTTCCTCTATGTCTACAAGGGCTACCAACCA
ATTGATGTGGTGAGGGACCTGCCATCTGGCTTCAACACCCTGAAACCAATCTTCAAACTGCCACTGGG
CATCAACATCACCAACTTCAGGGCTATCCTGACAGCCTTCAGCCCTGCCCAGGACACCTGGGGCACCT
CTGCTGCTGCCTACTTTGTGGGCTACCTGAAACCAACCACCTTTATGCTGAAATATGATGAGAATGGC
ACCATCACAGATGCTGTGGACTGTAGCCAGAACCCACTGGCTGAACTGAAATGTTCTGTGAAGTCCTT
TGAGATTGACAAGGGCATCTACCAGACCAGCAACTTCAGGGTGGTGCCATCTGGAGATGTGGTGAGGT
TTCCAAACATCACCAACCTGTGTCCATTTGGAGAGGTGTTCAATGCCACCAAGTTTCCATCTGTCTAT
GCCTGGGAGAGGAAGAAGATTAGCAACTGTGTGGCTGACTACTCTGTGCTCTACAACAGCACCTTCTT
CAGCACCTTCAAGTGTTATGGAGTGTCTGCCACCAAACTGAATGACCTGTGTTTCAGCAATGTCTATG
CTGACTCCTTTGTGGTGAAGGGAGATGATGTGAGACAGATTGCCCCTGGACAAACAGGAGTGATTGCT
GACTACAACTACAAACTGCCTGATGACTTTATGGGCTGTGTGCTGGCTTGGAACACCAGGAACATTGA
TGCCACCAGCACAGGCAACTACAACTACAAATACAGATACCTGAGACATGGCAAACTGAGACCATTTG
AGAGGGACATCAGCAATGTGCCATTCAGCCCTGATGGCAAGCCATGTACTCCTCCTGCCCTGAACTGT
TACTGGCCACTGAATGACTATGGCTTCTACACCACCACAGGCATTGGCTACCAACCATACAGGGTGGT
GGTGCTGTCCTTTGAACTGCTGAATGCCCCTGCCACAGTGTGTGGACCAAAACTGAGCACAGACCTGA
TTAAGAACCAGTGTGTGAACTTCAACTTCAATGGACTGACAGGCACAGGAGTGCTGACACCATCCAGC
AAGAGGTTCCAACCATTCCAACAGTTTGGCAGGGATGTGTCTGACTTCACAGACTCTGTGAGGGACCC
AAAGACCTCTGAGATTCTGGACATCAGCCCATGTTCCTTTGGAGGAGTGTCTGTGATTACACCTGGCA
CCAATGCCTCCTCTGAGGTGGCTGTGCTCTACCAGGATGTGAACTGTACTGATGTGAGCACAGCCATC
CATGCTGACCAACTTACACCTGCCTGGAGGATTTACAGCACAGGCAACAATGTGTTCCAGACCCAGGC
TGGCTGTCTGATTGGAGCAGAGCATGTGGACACCTCCTATGAGTGTGACATCCCAATTGGAGCAGGCA
TCTGTGCCTCCTACCACACAGTGTCCCTGCTGAGGAGCACCAGCCAGAAGAGCATTGTGGCTTACACA
ATGAGTCTGGGAGCAGACTCCAGCATTGCCTACAGCAACAACACCATTGCCATCCCAACCAACTTCAG
CATCAGCATCACCACAGAGGTGATGCCTGTGAGTATGGCTAAGACCTCTGTGGACTGTAATATGTATA
TCTGTGGAGACAGCACAGAGTGTGCCAACCTGCTGCTCCAATATGGCTCCTTCTGTACCCAACTTAAC
AGGGCTCTGTCTGGCATTGCTGCTGAACAGGACAGGAACACCAGGGAGGTGTTTGCCCAGGTGAAGCA
GATGTATAAGACACCAACCCTGAAATACTTTGGAGGCTTCAACTTCAGCCAGATTCTGCCTGACCCAC
TGAAACCAACCAAGAGGTCCCCAATTGAGGACCTGCTGTTCAACAAGGTGACCCTGGCTGATGCTGGC
TTTATGAAGCAATATGGAGAGTGTCTGGGAGACATCAATGCCAGGGACCTGATTTGTGCCCAGAAGTT
CAATGGACTGACAGTGCTGCCTCCACTGCTGACAGATGATATGATTGCTGCCTACACAGCAGCCCTGG
TGTCTGGCACAGCCACAGCAGGCTGGACCTTTGGAGCAGGACCAGCCCTCCAAATCCCATTTCCAATG
CAGATGGCTTACAGGTTCAATGGCATTGGAGTGACCCAGAATGTGCTCTATGAGAACCAGAAGCAGAT
TGCCAACCAGTTCAACAAGGCTATCAGCCAGATTCAGGAGTCCCTGACCACCACCCCAACAGCCCTGG
GCAAACTCCAAGATGTGGTGAACCAGAATGCCCAGGCTCTGAACACCCTGGTGAAGCAACTTTCCAGC
AACTTTGGAGCCATCTCCTCTGTGCTGAATGACATCCTGAGCAGACTGGACCCACCAGAGGCTGAGGT
CCAGATTGACAGACTGATTACAGGCAGACTCCAATCCCTCCAAACCTATGTGACCCAACAACTTATCA
GGGCTGCTGAGATTAGGGCATCTGCCAACCTGGCTGCCACCAAGATGAGTGAGTGTGTGCTGGGACAA
AGCAAGAGGGTGGACTTCTGTGGCAAGGGCTACCACCTGATGAGTTTTCCACAGGCTGCCCCTCATGG
AGTGGTGTTCCTGCATGTGACCTATGTGCCAAGCCAGGAGAGGAACTTCACCACAGCCCCTGCCATCT
GCCATGAGGGCAAGGCTTACTTTCCAAGGGAGGGAGTGTTTGTGTTCAATGGCACCTCCTGGTTCATC
ACCCAGAGGAACTTCTTCAGCCCACAGATTATCACCACAGACAACACCTTTGTGTCTGGCAACTGTGA
TGTGGTGATTGGCATCATCAACAACACAGTCTATGACCCACTCCAACCTGAACTGGACTCCTTCAAGG
AGGAACTGGACAAATACTTCAAGAACCACACCAGCCCTGATGTGGACCTGGGAGACATCTCTGGCATC
AATGCCTCTGTGGTGAACATCCAGAAGGAGATTGACAGACTGAATGAGGTGGCTAAGAACCTGAATGA
GTCCCTGATTGACCTCCAAGAACTGGGCAAATATGAACAATACATCAAGTGGCCATGGTATGTGTGGC
TGGGCTTCATTGCTGGACTGATTGCCATTGTGATGGTGACCATCCTGCTGTGTTGTATGACCTCCTGT
TGTTCCTGTCTGAAAGGAGCCTGTTCCTGTGGCTCCTGTTGTAAGTTTGATGAGGATGACTCTGAACC
TGTGCTGAAAGGAGTGAAACTGCACTACACCTAACTCGAGCTGGTACTGCATGCACGCAATGCTAGCT
GCCCCTTTCCCGTCCTGGGTACCCCGAGTCTCCCCCGACCTCGGGTCCCAGGTATGCTCCCACCTCCA
CCTGCCCCACTCACCACCTCTGCTAGTTCCAGACACCTCCCAAGCACGCAGCAATGCAGCTCAAAACG
CTTAGCCTAGCCACACCCCCACGGGAAACAGCAGTGATTAACCTTTAGCAATAAACGAAAGTTTAACT
AAGCTATACTAACCCCAGGGTTGGTCAATTTCGTGCCAGCCACACCCTGGAGCTAGCaaaccgctgat
cagcctcgactgtgccttctagttgccagccatctgttgtttgcccctcccccgtgccttccttgacc
ctggaaggtgccactcccactgtcctttcctaataaaatgaggaaattgcatcgcattgtctgagtag
gtgtcattctattctggggggtggggtggggcaggacagcaagggggaggattgggaagacaatagca
ggcatgctggggatgcggtgggctctatggcttctgaggcggaaagaaccagctggggctctaggggg
tatccccacgcgccctgtagcggcgcattaagcgcggcgggtgtggtggttacgcgcagcgtgaccgc
tacacttgccagcgccctagcgcccgctcctttcgctttcttcccttcctttctcgccacgttcgccg
gctttccccgtcaagctctaaatcgggggctccctttagggttccgatttagtgctttacggcacctc
gaccccaaaaaacttgattagggtgatggttcacgtagtgggccatcgccctgatagacggtttttcg
ccctttgacgttggagtccacgttctttaatagtggactcttgttccaaactggaacaacactcaacc
ctatctcggtctattcttttgatttataagggattttgccgatttcggcctattggttaaaaaatgag
ctgatttaacaaaaatttaacgcgaattaattctgtggaatgtgtgtcagttagggtgtggaaagtcc
ccaggctccccagcaggcagaagtatgcaaagcatgcatctcaattagtcagcaaccaggtgtggaaa
gtccccaggctccccagcaggcagaagtatgcaaagcatgcatctcaattagtcagcaaccatagtcc
cgcccctaactccgcccatcccgcccctaactccgcccagttccgcccattctccgccccatggctga
ctaattttttttatttatgcagaggccgaggccgcctctgcctctgagctattccagaagtagtgagg
aggcttttttggaggcctaggcttttgcaaaaagctcccgggagcttgtatatccattttcggatctg
atcaagagacaggatgaggatcgtttcgcatgattgaacaagatggattgcacgcaggttctccggcc
gcttgggtggagaggctattcggctatgactgggcacaacagacaatcggctgctctgatgccgccgt
gttccggctgtcagcgcaggggcgcccggttctttttgtcaagaccgacctgtccggtgccctgaatg
aactgcaggacgaggcagcgcggctatcgtggctggccacgacgggcgttccttgcgcagctgtgctc
gacgttgtcactgaagcgggaagggactggctgctattgggcgaagtgccggggcaggatctcctgtc
atctcaccttgctcctgccgagaaagtatccatcatggctgatgcaatgcggcggctgcatacgcttg
atccggctacctgcccattcgaccaccaagcgaaacatcgcatcgagcgagcacgtactcggatggaa
gccggtcttgtcgatcaggatgatctggacgaagagcatcaggggctcgcgccagccgaactgttcgc
caggctcaaggcgcgcatgcccgacggcgaggatctcgtcgtgacccatggcgatgcctgcttgccga
atatcatggtggaaaatggccgcttttctggattcatcgactgtggccggctgggtgtggcggaccgc
tatcaggacatagcgttggctacccgtgatattgctgaagagcttggcggcgaatgggctgaccgctt
cctcgtgctttacggtatcgccgctcccgattcgcagcgcatcgccttctatcgccttcttgacgagt
tcttctgagcgggactctggggttcgaaatgaccgaccaagcgacgcccaacctgccatcacgagatt
tcgattccaccgccgccttctatgaaaggttgggcttcggaatcgttttccgggacgccggctggatg
atcctccagcgcggggatctcatgctggagttcttcgcccaccccaacttgtttattgcagcttataa
tggttacaaataaagcaatagcatcacaaatttcacaaataaagcatttttttcactgcattctagtt
gtggtttgtccaaactcatcaatgtatcttatcatgtctgtataccgtcgacctctagctagagcttg
gcgtaatcatggtcatagctgtttcctgtgtgaaattgttatccgctcacaattccacacaacatacg
agccggaagcataaagtgtaaagcctggggtgcctaatgagtgagctaactcacattaattgcgttgc
gctcactgcccgctttccagtcgggaaacctgtcgtgccagctgcattaatgaatcggccaacgcgcg
gggagaggcggtttgcgtattgggcgctcttccgcttcctcgctcactgactcgctgcgctcggtcgt
tcggctgcggcgagcggtatcagctcactcaaaggcggtaatacggttatccacagaatcaggggata
acgcaggaaagaacatgtgagcaaaaggccagcaaaaggccaggaaccgtaaaaaggccgcgttgctg
gcgtttttccataggctccgcccccctgacgagcatcacaaaaatcgacgctcaagtcagaggtggcg
aaacccgacaggactataaagataccaggcgtttccccctggaagctccctcgtgcgctctcctgttc
cgaccctgccgcttaccggatacctgtccgcctttctcccttcgggaagcgtggcgctttctcatagc
tcacgctgtaggtatctcagttcggtgtaggtcgttcgctccaagctgggctgtgtgcacgaaccccc
cgttcagcccgaccgctgcgccttatccggtaactatcgtcttgagtccaacccggtaagacacgact
tatcgccactggcagcagccactggtaacaggattagcagagcgaggtatgtaggcggtgctacagag
ttcttgaagtggtggcctaactacggctacactagaagaacagtatttggtatctgcgctctgctgaa
gccagttaccttcggaaaaagagttggtagctcttgatccggcaaacaaaccaccgctggtagcggtg
gtttttttgtttgcaagcagcagattacgcgcagaaaaaaaggatctcaagaagatcctttgatcttt
tctacggggtctgacgctcagtggaacgaaaactcacgttaagggattttggtcatgagattatcaaa
aaggatcttcacctagatccttttaaattaaaaatgaagttttaaatcaatctaaagtatatatgagt
aaacttggtctgacagttaccaatgcttaatcagtgaggcacctatctcagcgatctgtctatttcgt
tcatccatagttgcctgactccccgtcgtgtagataactacgatacgggagggcttaccatctggccc
cagtgctgcaatgataccgcgagacccacgctcaccggctccagatttatcagcaataaaccagccag
ccggaagggccgagcgcagaagtggtcctgcaactttatccgcctccatccagtctattaattgttgc
cgggaagctagagtaagtagttcgccagttaatagtttgcgcaacgttgttgccattgctacaggcat
cgtggtgtcacgctcgtcgtttggtatggcttcattcagctccggttcccaacgatcaaggcgagtta
catgatcccccatgttgtgcaaaaaagcggttagctccttcggtcctccgatcgttgtcagaagtaag
ttggccgcagtgttatcactcatggttatggcagcactgcataattctcttactgtcatgccatccgt
aagatgcttttctgtgactggtgagtactcaaccaagtcattctgagaatagtgtatgcggcgaccga
gttgctcttgcccggcgtcaatacgggataataccgcgccacatagcagaactttaaaagtgctcatc
attggaaaacgttcttcggggcgaaaactctcaaggatcttaccgctgttgagatccagttcgatgta
acccactcgtgcacccaactgatcttcagcatcttttactttcaccagcgtttctgggtgagcaaaaa
caggaaggcaaaatgccgcaaaaaagggaataagggcgacacggaaatgttgaatactcatactcttc
ctttttcaatattattgaagcatttatcagggttattgtctcatgagcggatacatatttgaatgtat
ttagaaaaataaacaaataggggttccgcgcacatttccccgaaaagtgccacctgacgtc
PVP34c MERSCOV UTR Hexapro
(SEQ ID NO: 41)
gacggatcgggagatctcccgatcccctatggtgcactctcagtacaatctgctctgatgccgcatag
ttaagccagtatctgctccctgcttgtgtgttggaggtcgctgagtagtgcgcgagcaaaatttaagc
tacaacaaggcaaggcttgaccgacaattgcatgaagaatctgcttagggttaggcgttttgcgctgc
ttcgcgatgtacgggccagatatacgcgttgacattgattattgactagttattaatagtaatcaatt
acggggtcattagttcatagcccatatatggagttccgcgttacataacttacggtaaatggcccgcc
tggctgaccgcccaacgacccccgcccattgacgtcaataatgacgtatgttcccatagtaacgccaa
tagggactttccattgacgtcaatgggtggagtatttacggtaaactgcccacttggcagtacatcaa
gtgtatcatatgccaagtacgccccctattgacgtcaatgacggtaaatggcccgcctggcattatgc
ccagtacatgaccttatgggactttcctacttggcagtacatctacgtattagtcatcgctattacca
tggtgatgcggttttggcagtacatcaatgggcgtggatagcggtttgactcacggggatttccaagt
ctccaccccattgacgtcaatgggagtttgttttggcaccaaaatcaacgggactttccaaaatgtcg
taacaactccgccccattgacgcaaatgggcggtaggcgtgtacggtgggaggtctatataagcagag
ctctctggctaactagagaacccactgcttactggcttatcgaaattaatacgactcactatagggag
acccaagctggctagccaccGAGAATAAACTAGTATTCTTCTGGTCCCCACAGACTCAGAGAGAACCC
GCCACCATgATTCACTCTGTGTTCCTGCTGATGTTCCTGCTGACACCAACAGAGTCCTATGTGGATGT
GGGACCTGACTCTGTGAAGTCTGCCTGTATTGAGGTGGACATCCAACAGACCTTCTTTGACAAGACCT
GGCCAAGACCAATTGATGTGAGCAAGGCTGATGGCATCATCTACCCACAGGGCAGGACCTACAGCAAC
ATCACCATCACCTACCAGGGACTGTTTCCATACCAGGGAGATCATGGAGATATGTATGTCTACTCTGC
TGGTCATGCCACAGGCACCACACCACAGAAACTGTTTGTGGCTAACTACAGCCAGGATGTGAAGCAGT
TTGCCAATGGCTTTGTGGTGAGGATTGGAGCAGCAGCCAACAGCACAGGCACAGTGATTATCAGCCCA
AGCACCTCTGCCACCATCAGGAAGATTTACCCTGCCTTTATGCTGGGCTCCTCTGTGGGCAACTTCTC
TGATGGCAAGATGGGCAGGTTCTTCAACCACACCCTGGTGCTGCTGCCTGATGGCTGTGGCACCCTGC
TGAGGGCTTTCTACTGTATCTTGGAACCAAGGTCTGGCAACCACTGTCCTGCTGGCAACTCCTACACC
TCCTTTGCCACCTACCACACACCTGCCACAGACTGTTCTGATGGCAACTACAACAGGAATGCCTCCCT
GAACTCCTTCAAGGAATACTTCAACCTGAGGAACTGTACCTTTATGTACACCTACAACATCACAGAGG
ATGAGATTTTGGAGTGGTTTGGCATCACCCAGACAGCCCAGGGAGTGCATCTGTTCTCGAGCAGATAT
GTGGACCTCTATGGAGGCAATATGTTCCAGTTTGCCACCCTGCCTGTCTATGACACCATCAAATACTA
CAGCATCATCCCACACAGCATCAGGAGCATCCAGTCTGACAGGAAGGCTTGGGCTGCCTTCTATGTCT
ACAAACTCCAACCACTGACCTTCCTGCTGGACTTCTCTGTGGATGGCTACATCAGGAGGGCTATTGAC
TGTGGCTTCAATGACCTGAGCCAACTTCACTGTTCCTATGAGTCCTTTGATGTGGAGTCTGGAGTCTA
CTCTGTGTCCTCCTTTGAGGCTAAGCCATCTGGCTCTGTGGTGGAACAGGCTGAGGGAGTGGAGTGTG
ACTTCAGCCCACTGCTGTCTGGCACACCTCCACAGGTCTACAACTTCAAGAGACTGGTGTTCACCAAC
TGTAACTACAACCTGACCAAACTGCTGTCCCTGTTCTCTGTGAATGACTTCACTTGTAGCCAGATTAG
CCCTGCTGCCATTGCCAGCAACTGTTACTCCTCCCTGATTCTGGACTACTTCTCCTACCCACTGAGTA
TGAAGTCTGACCTGTCTGTGTCCTCTGCTGGACCAATCAGCCAGTTCAACTACAAGCAGTCCTTCAGC
AACCCAACTTGTCTGATTCTGGCTACAGTGCCACACAACCTGACCACCATCACCAAGCCACTGAAATA
CTCCTACATCAACAAGTGTAGCAGACTGCTGTCTGATGACAGGACAGAGGTGCCACAACTAGTGAATG
CCAACCAATACAGCCCATGTGTGAGCATTGTGCCAAGCACAGTGTGGGAGGATGGAGACTACTACAGG
AAGCAACTTAGCCCATTGGAGGGAGGAGGCTGGCTGGTGGCATCTGGCAGCACAGTGGCTATGACAGA
ACAACTCCAAATGGGCTTTGGCATCACAGTCCAATATGGCACAGACACCAACTCTGTGTGTCCAAAAT
TGGAGTTTGCCAATGACACCAAGATTGCCAGCCAACTTGGCAACTGTGTGGAATACTCCCTCTATGGA
GTGTCTGGCAGGGGAGTGTTCCAGAACTGTACTGCTGTGGGAGTGAGACAACAGAGGTTTGTCTATGA
TGCCTACCAGAACCTGGTGGGCTACTACTCTGATGATGGCAACTACTACTGTCTGAGGGCTTGTGTGT
CTGTGCCTGTGTCTGTGATTTATGACAAGGAGACCAAGACCCATGCCACCCTGTTTGGCTCTGTGGCT
TGTGAACACATCTCCAGCACAATGAGTCAATACAGCAGGAGCACCAGGAGTATGCTGAAAAGGAGGGA
CAGCACATATGGACCACTCCAAACACCTGTGGGCTGTGTGCTGGGACTGGTGAACTCCTCCCTGTTTG
TGGAGGACTGTAAACTGCCACTGGGACAATCCCTGTGTGCCCTGCCTGACACACCAAGCACCCTGACA
CCAAGGTCTGTGAGGTCTGTGCCTGGAGAGATGAGACTGGCAAGCATTGCCTTCAACCACCCAATCCA
GGTGGACCAACTTAACTCCTCCTACTTCAAACTGAGCATCCCAACCAACTTCTCCTTTGGAGTGACCC
AGGAATACATCCAGACCACCATCCAGAAGGTGACAGTGGACTGTAAGCAATATGTGTGTAATGGCTTC
CAGAAGTGTGAACAACTTCTGAGGGAATATGGACAATTCTGTAGCAAGATAAACCAGGCTCTTCATGG
AGCCAACCTGAGACAGGATGACTCTGTGAGGAACCTGTTTGCCTCTGTGAAGTCCAGCCAGTCCAGCC
CAATCATCCCTGGCTTTGGAGGAGACTTCAACCTGACCCTGTTGGAACCGGTGAGCATCAGCACAGGC
AGCAGGTCTGCCAGGTCTCCAATTGAGGACCTGCTGTTTGACAAGGTGACCATTGCTGACCCTGGCTA
TATGCAGGGCTATGATGACTGTATGCAACAGGGACCTGCCTCTGCCAGGGACCTGATTTGTGCCCAAT
ATGTGGCTGGCTACAAGGTGCTGCCTCCACTGATGGATGTGAATATGGAGGCTGCCTACACCTCCTCC
CTGCTGGGCAGCATTGCTGGAGTGGGCTGGACTGCAGGACTGTCCCCATTTGCTGCCATCCCATTTCC
ACAGAGCATCTTCTACAGACTGAATGGAGTGGGCATCACCCAACAGGTGCTGTCTGAGAACCAGAAAC
TGATTGCCAACAAGTTCAACCAGGCTCTGGGAGCTATGCAGACAGGCTTCACCACCACCCCAGAGGCT
TTCCAGAAGGTCCAGGATGCTGTGAACAACAATGCCCAGGCTCTGAGCAAACTGGCATCTGAACTGAG
CAACACCTTTGGAGCCATCTCTGCTAGCATTGGAGACATCATCCAGAGACTGGATCCACCAGAACAGG
ATGCCCAGATTGACAGACTGATAAATGGCAGACTGACCACCCTGAATGCCTTTGTGGCTCAACAACTT
GTGAGGTCTGAGTCTGCTGCCCTGTCTGCCCAACTTGCCAAGGACAAGGTGAATGAGTGTGTGAAGGC
TCAAAGCAAGAGGTCTGGCTTCTGTGGACAAGGCACCCACATTGTGTCCTTTGTGGTGAATGCCCCAA
ATGGACTCTACTTTATGCATGTGGGCTACTACCCAAGCAACCACATTGAGGTGGTGTCTGCCTATGGA
CTGTGTGATGCTGCCAACCCAACCAACTGTATTGCCCCTGTGAATGGCTACTTCATCAAGACCAACAA
CACCAGGATTGTGGATGAGTGGTCCTACACAGGCTCCTCCTTCTATGCCCCTGAACCAATCACCTCCC
TGAACACCAAATATGTGGCTCCACAGGTGACCTACCAGAACATCAGCACCAACCTGCCTCCTCCACTG
CTGGGCAACAGCACAGGCATTGACTTCCAGGATGAACTGGATGAGTTCTTCAAGAATGTGAGCACCAG
CATCCCAAACTTTGGCTCCCTGACCCAGATAAACACCACCCTGCTGGACCTGACCTATGAGATGCTGT
CCCTCCAACAGGTGGTGAAGGCTCTGAATGAGTCCTACATTGACCTGAAAGAACTGGGCAACTACACC
TACTACAACAAGTGGCCATGGTACATCTGGCTGGGCTTCATCGCTGGCCTGGTGGCCCTGGCGCTGTG
CGTGTTCTTCATCCTGTGCTGCACCGGCTGCGGCACCAACTGCATGGGCAAGCTGAAGTGCAACAGGT
GCTGCGACAGGTACGAGGAGTACGACCTGGAGCCCCACAAGGTGCACGTACATTAACTCGAGCTGGTA
CTGCATGCACGCAATGCTAGCTGCCCCTTTCCCGTCCTGGGTACCCCGAGTCTCCCCCGACCTCGGGT
CCCAGGTATGCTCCCACCTCCACCTGCCCCACTCACCACCTCTGCTAGTTCCAGACACCTCCCAAGCA
CGCAGCAATGCAGCTCAAAACGCTTAGCCTAGCCACACCCCCACGGGAAACAGCAGTGATTAACCTTT
AGCAATAAACGAAAGTTTAACTAAGCTATACTAACCCCAGGGTTGGTCAATTTCGTGCCAGCCACACC
CTGGAGCTAGCaaaccgctgatcagcctcgactgtgccttctagttgccagccatctgttgtttgccc
ctcccccgtgccttccttgaccctggaaggtgccactcccactgtcctttcctaataaaatgaggaaa
ttgcatcgcattgtctgagtaggtgtcattctattctggggggtggggtggggcaggacagcaagggg
gaggattgggaagacaatagcaggcatgctggggatgcggtgggctctatggcttctgaggcggaaag
aaccagctggggctctagggggtatccccacgcgccctgtagcggcgcattaagcgcggcgggtgtgg
tggttacgcgcagcgtgaccgctacacttgccagcgccctagcgcccgctcctttcgctttcttccct
tcctttctcgccacgttcgccggctttccccgtcaagctctaaatcgggggctccctttagggttccg
atttagtgctttacggcacctcgaccccaaaaaacttgattagggtgatggttcacgtagtgggccat
cgccctgatagacggtttttcgccctttgacgttggagtccacgttctttaatagtggactcttgttc
caaactggaacaacactcaaccctatctcggtctattcttttgatttataagggattttgccgatttc
ggcctattggttaaaaaatgagctgatttaacaaaaatttaacgcgaattaattctgtggaatgtgtg
tcagttagggtgtggaaagtccccaggctccccagcaggcagaagtatgcaaagcatgcatctcaatt
agtcagcaaccaggtgtggaaagtccccaggctccccagcaggcagaagtatgcaaagcatgcatctc
aattagtcagcaaccatagtcccgcccctaactccgcccatcccgcccctaactccgcccagttccgc
ccattctccgccccatggctgactaattttttttatttatgcagaggccgaggccgcctctgcctctg
agctattccagaagtagtgaggaggcttttttggaggcctaggcttttgcaaaaagctcccgggagct
tgtatatccattttcggatctgatcaagagacaggatgaggatcgtttcgcatgattgaacaagatgg
attgcacgcaggttctccggccgcttgggtggagaggctattcggctatgactgggcacaacagacaa
tcggctgctctgatgccgccgtgttccggctgtcagcgcaggggcgcccggttctttttgtcaagacc
gacctgtccggtgccctgaatgaactgcaggacgaggcagcgcggctatcgtggctggccacgacggg
cgttccttgcgcagctgtgctcgacgttgtcactgaagcgggaagggactggctgctattgggcgaag
tgccggggcaggatctcctgtcatctcaccttgctcctgccgagaaagtatccatcatggctgatgca
atgcggcggctgcatacgcttgatccggctacctgcccattcgaccaccaagcgaaacatcgcatcga
gcgagcacgtactcggatggaagccggtcttgtcgatcaggatgatctggacgaagagcatcaggggc
tcgcgccagccgaactgttcgccaggctcaaggcgcgcatgcccgacggcgaggatctcgtcgtgacc
catggcgatgcctgcttgccgaatatcatggtggaaaatggccgcttttctggattcatcgactgtgg
ccggctgggtgtggcggaccgctatcaggacatagcgttggctacccgtgatattgctgaagagcttg
gcggcgaatgggctgaccgcttcctcgtgctttacggtatcgccgctcccgattcgcagcgcatcgcc
ttctatcgccttcttgacgagttcttctgagcgggactctggggttcgaaatgaccgaccaagcgacg
cccaacctgccatcacgagatttcgattccaccgccgccttctatgaaaggttgggcttcggaatcgt
tttccgggacgccggctggatgatcctccagcgcggggatctcatgctggagttcttcgcccacccca
acttgtttattgcagcttataatggttacaaataaagcaatagcatcacaaatttcacaaataaagca
tttttttcactgcattctagttgtggtttgtccaaactcatcaatgtatcttatcatgtctgtatacc
gtcgacctctagctagagcttggcgtaatcatggtcatagctgtttcctgtgtgaaattgttatccgc
tcacaattccacacaacatacgagccggaagcataaagtgtaaagcctggggtgcctaatgagtgagc
taactcacattaattgcgttgcgctcactgcccgctttccagtcgggaaacctgtcgtgccagctgca
ttaatgaatcggccaacgcgcggggagaggcggtttgcgtattgggcgctcttccgcttcctcgctca
ctgactcgctgcgctcggtcgttcggctgcggcgagcggtatcagctcactcaaaggcggtaatacgg
ttatccacagaatcaggggataacgcaggaaagaacatgtgagcaaaaggccagcaaaaggccaggaa
ccgtaaaaaggccgcgttgctggcgtttttccataggctccgcccccctgacgagcatcacaaaaatc
gacgctcaagtcagaggtggcgaaacccgacaggactataaagataccaggcgtttccccctggaagc
tccctcgtgcgctctcctgttccgaccctgccgcttaccggatacctgtccgcctttctcccttcggg
aagcgtggcgctttctcatagctcacgctgtaggtatctcagttcggtgtaggtcgttcgctccaagc
tgggctgtgtgcacgaaccccccgttcagcccgaccgctgcgccttatccggtaactatcgtcttgag
tccaacccggtaagacacgacttatcgccactggcagcagccactggtaacaggattagcagagcgag
gtatgtaggcggtgctacagagttcttgaagtggtggcctaactacggctacactagaagaacagtat
ttggtatctgcgctctgctgaagccagttaccttcggaaaaagagttggtagctcttgatccggcaaa
caaaccaccgctggtagcggtggtttttttgtttgcaagcagcagattacgcgcagaaaaaaaggatc
tcaagaagatcctttgatcttttctacggggtctgacgctcagtggaacgaaaactcacgttaaggga
ttttggtcatgagattatcaaaaaggatcttcacctagatccttttaaattaaaaatgaagttttaaa
tcaatctaaagtatatatgagtaaacttggtctgacagttaccaatgcttaatcagtgaggcacctat
ctcagcgatctgtctatttcgttcatccatagttgcctgactccccgtcgtgtagataactacgatac
gggagggcttaccatctggccccagtgctgcaatgataccgcgagacccacgctcaccggctccagat
ttatcagcaataaaccagccagccggaagggccgagcgcagaagtggtcctgcaactttatccgcctc
catccagtctattaattgttgccgggaagctagagtaagtagttcgccagttaatagtttgcgcaacg
ttgttgccattgctacaggcatcgtggtgtcacgctcgtcgtttggtatggcttcattcagctccggt
tcccaacgatcaaggcgagttacatgatcccccatgttgtgcaaaaaagcggttagctccttcggtcc
tccgatcgttgtcagaagtaagttggccgcagtgttatcactcatggttatggcagcactgcataatt
ctcttactgtcatgccatccgtaagatgcttttctgtgactggtgagtactcaaccaagtcattctga
gaatagtgtatgcggcgaccgagttgctcttgcccggcgtcaatacgggataataccgcgccacatag
cagaactttaaaagtgctcatcattggaaaacgttcttcggggcgaaaactctcaaggatcttaccgc
tgttgagatccagttcgatgtaacccactcgtgcacccaactgatcttcagcatcttttactttcacc
agcgtttctgggtgagcaaaaacaggaaggcaaaatgccgcaaaaaagggaataagggcgacacggaa
atgttgaatactcatactcttcctttttcaatattattgaagcatttatcagggttattgtctcatga
gcggatacatatttgaatgtatttagaaaaataaacaaataggggttccgcgcacatttccccgaaaa
gtgccacctgacgtc
PVP36b SARS-COV-2 UTR Spike delta Hexapro
(SEQ ID NO: 42)
gacggatcgggagatctcccgatcccctatggtgcactctcagtacaatctgctctgatgccgcatag
ttaagccagtatctgctccctgcttgtgtgttggaggtcgctgagtagtgcgcgagcaaaatttaagc
tacaacaaggcaaggcttgaccgacaattgcatgaagaatctgcttagggttaggcgttttgcgctgc
ttcgcgatgtacgggccagatatacgcgttgacattgattattgactagttattaatagtaatcaatt
acggggtcattagttcatagcccatatatggagttccgcgttacataacttacggtaaatggcccgcc
tggctgaccgcccaacgacccccgcccattgacgtcaataatgacgtatgttcccatagtaacgccaa
tagggactttccattgacgtcaatgggtggagtatttacggtaaactgcccacttggcagtacatcaa
gtgtatcatatgccaagtacgccccctattgacgtcaatgacggtaaatggcccgcctggcattatgc
ccagtacatgaccttatgggactttcctacttggcagtacatctacgtattagtcatcgctattacca
tggtgatgcggttttggcagtacatcaatgggcgtggatagcggtttgactcacggggatttccaagt
ctccaccccattgacgtcaatgggagtttgttttggcaccaaaatcaacgggactttccaaaatgtcg
taacaactccgccccattgacgcaaatgggcggtaggcgtgtacggtgggaggtctatataagcagag
ctctctggctaactagagaacccactgcttactggcttatcgaaattaatacgactcactatagggag
acccaagctggctagccaccGAGAATAAACTAGTATTCTTCTGGTCCCCACAGACTCAGAGAGAACCC
GCCACCATgTTTGTGTTCCTGGTGCTGCTGCCACTGGTGTCCAGCCAGTGTGTGAACCTGAGGACCAG
GACCCAACTTCCTCCTGCCTACACCAACTCCTTCACCAGGGGAGTCTACTACCCTGACAAGGTGTTCA
GGTCCTCTGTGCTGCACAGCACCCAGGACCTGTTCCTGCCATTCTTCAGCAATGTGACCTGGTTCCAT
GCCATCCATGTGTCTGGCACCAATGGCACCAAGAGGTTTGACAACCCTGTGCTGCCATTCAATGATGG
AGTCTACTTTGCCAGCACAGAGAAGAGCAACATCATCAGGGGCTGGATTTTTGGCACCACCCTGGACA
GCAAGACCCAGTCCCTGCTGATTGTGAACAATGCCACCAATGTGGTGATTAAGGTGTGTGAGTTCCAG
TTCTGTAATGACCCATTCCTGGACGTCTACTACCACAAGAACAACAAGTCCTGGATGGAGTCTGGCGT
CTACTCCTCTGCCAACAACTGTACCTTTGAATATGTGAGCCAACCATTCCTGATGGACTTGGAGGGCA
AGCAGGGCAACTTCAAGAACCTGAGGGAGTTTGTGTTCAAGAACATTGATGGCTACTTCAAGATTTAC
AGCAAACACACACCAATCAACCTGGTGAGGGACCTGCCACAGGGCTTCTCTGCCTTGGAACCACTGGT
GGACCTGCCAATTGGCATCAACATCACCAGGTTCCAGACCCTGCTGGCTCTGCACAGGTCCTACCTGA
CACCTGGAGACTCCTCCTCTGGCTGGACAGCAGGAGCAGCAGCCTACTATGTGGGCTACCTCCAACCA
AGGACCTTCCTGCTGAAATACAATGAGAATGGCACCATCACAGATGCTGTGGACTGTGCCCTGGACCC
ACTGTCTGAGACCAAGTGTACCCTGAAATCCTTCACAGTGGAGAAGGGCATCTACCAGACCAGCAACT
TCAGGGTCCAACCAACAGAGAGCATTGTGAGGTTTCCAAACATCACCAACCTGTGTCCATTTGGAGAG
GTGTTCAATGCCACCAGGTTTGCCTCTGTCTATGCCTGGAACAGGAAGAGGATTAGCAACTGTGTGGC
TGACTACTCTGTGCTCTACAACTCTGCCTCCTTCAGCACCTTCAAGTGTTATGGAGTGAGCCCAACCA
AACTGAATGACCTGTGTTTCACCAATGTCTATGCTGACTCCTTTGTGATTAGGGGAGATGAGGTGAGA
CAGATTGCCCCTGGACAAACAGGCAAGATTGCTGACTACAACTACAAACTGCCTGATGACTTCACAGG
CTGTGTGATTGCCTGGAACAGCAACAACCTGGACAGCAAGGTGGGAGGCAACTACAACTACAGGTACA
GACTGTTCAGGAAGAGCAACCTGAAACCATTTGAGAGGGACATCAGCACAGAGATTTACCAGGCTGGC
AGCAAGCCATGTAATGGAGTGGAGGGCTTCAACTGTTACTTTCCACTCCAATCCTATGGCTTCCAACC
AACCAATGGAGTGGGCTACCAACCATACAGGGTGGTGGTGCTGTCCTTTGAACTGCTCCATGCCCCTG
CCACAGTGTGTGGACCAAAGAAGAGCACCAACCTGGTGAAGAACAAGTGTGTGAACTTCAACTTCAAT
GGACTGACAGGCACAGGAGTGCTGACAGAGAGCAACAAGAAGTTCCTGCCATTCCAACAGTTTGGCAG
GGACATTGCTGACACCACAGATGCTGTGAGGGACCCACAGACCTTGGAGATTCTGGACATCACACCAT
GTTCCTTTGGAGGAGTGTCTGTGATTACACCTGGCACCAACACCAGCAACCAGGTGGCTGTGCTCTAC
CAGGGCGTGAACTGTACTGAGGTGCCTGTGGCTATCCATGCTGACCAACTTACACCAACCTGGAGGGT
CTACAGCACAGGAAGCAACGTGTTCCAGACCAGGGCTGGCTGTCTGATTGGAGCAGAGCATGTGAACA
ACTCCTATGAGTGTGACATCCCAATTGGAGCAGGCATCTGTGCCTCCTACCAGACCCAGACCAACAGC
AGGGGCTCTGCATCTTCTGTGGCAAGCCAGAGCATCATTGCCTACACAATGAGTCTGGGAGCAGAGAA
CTCTGTGGCTTACAGCAACAACAGCATTGCCATCCCAACCAACTTCACCATCTCTGTGACCACAGAGA
TTCTGCCTGTGAGTATGACCAAGACCTCTGTGGACTGTACAATGTATATCTGTGGAGACAGCACAGAG
TGTAGCAACCTGCTGCTCCAATATGGCTCCTTCTGTACCCAACTTAACAGGGCTCTGACAGGCATTGC
TGTGGAACAGGACAAGAACACCCAGGAGGTGTTTGCCCAGGTGAAGCAGATTTACAAGACACCTCCAA
TCAAGGACTTTGGAGGCTTCAACTTCAGCCAGATTCTGCCTGACCCAAGCAAGCCAAGCAAGAGGTCC
CCTATTGAGGACCTGCTGTTCAACAAGGTGACCCTGGCTGATGCTGGCTTCATCAAGCAATATGGAGA
CTGTCTGGGAGACATTGCCGCCAGGGACCTGATTTGTGCCCAGAAGTTCAATGGACTGACAGTGCTGC
CTCCACTGCTGACAGATGAGATGATTGCCCAATACACCTCTGCCCTGCTGGCTGGCACCATCACCTCT
GGCTGGACCTTTGGAGCAGGACCAGCCCTCCAAATCCCATTTCCAATGCAGATGGCTTACAGGTTCAA
TGGCATTGGAGTGACCCAGAATGTGCTCTATGAGAACCAGAAACTGATTGCCAACCAGTTCAACTCTG
CCATTGGCAAGATTCAGGACTCCCTGTCCAGCACACCATCTGCCCTGGGCAAACTCCAAAACGTGGTG
AACCAGAATGCCCAGGCTCTGAACACCCTGGTGAAGCAACTTTCCAGCAACTTTGGAGCCATCTCCTC
TGTGCTGAATGACATCCTGAGCAGACTGGACCCACCAGAGGCTGAGGTCCAGATTGACAGACTGATTA
CAGGCAGACTCCAATCCCTCCAAACCTATGTGACCCAACAACTTATCAGGGCTGCTGAGATTAGGGCA
TCTGCCAACCTGGCTGCCACCAAGATGAGTGAGTGTGTGCTGGGACAAAGCAAGAGGGTGGACTTCTG
TGGCAAGGGCTACCACCTGATGAGTTTTCCACAGTCTGCCCCTCATGGAGTGGTGTTCCTGCATGTGA
CCTATGTGCCTGCCCAGGAGAAGAACTTCACCACAGCCCCTGCCATCTGCCATGATGGCAAGGCTCAC
TTTCCAAGGGAGGGAGTGTTTGTGAGCAATGGCACCCACTGGTTTGTGACCCAGAGGAACTTCTATGA
ACCACAGATTATCACCACAGACAACACCTTTGTGTCTGGCAACTGTGATGTGGTGATTGGCATTGTGA
ACAACACAGTCTATGACCCACTCCAACCTGAACTGGACTCCTTCAAGGAGGAACTGGACAAATACTTC
AAGAACCACACCAGCCCTGATGTGGACCTGGGAGACATCTCTGGCATCAATGCCTCTGTGGTGAACAT
CCAGAAGGAGATTGACAGACTGAATGAGGTGGCTAAGAACCTGAATGAGTCCCTGATTGACCTCCAAG
AACTGGGCAAATATGAACAATACATCAAGTGGCCATGGTACATCTGGCTGGGCTTCATTGCTGGACTG
ATTGCCATTGTGATGGTGACCATAATGCTGTGTTGTATGACCTCCTGTTGTTCCTGTCTGAAAGGCTG
TTGTTCCTGTGGCTCCTGTTGTAAGTTTGATGAGGATGACTCTGAACCTGTGCTGAAAGGAGTGAAAC
TGCACTACACCTGACTCGAGCTGGTACTGCATGCACGCAATGCTAGCTGCCCCTTTCCCGTCCTGGGT
ACCCCGAGTCTCCCCCGACCTCGGGTCCCAGGTATGCTCCCACCTCCACCTGCCCCACTCACCACCTC
TGCTAGTTCCAGACACCTCCCAAGCACGCAGCAATGCAGCTCAAAACGCTTAGCCTAGCCACACCCCC
ACGGGAAACAGCAGTGATTAACCTTTAGCAATAAACGAAAGTTTAACTAAGCTATACTAACCCCAGGG
TTGGTCAATTTCGTGCCAGCCACACCCTGGAGCTAGCaaaccgctgatcagcctcgactgtgccttct
agttgccagccatctgttgtttgcccctcccccgtgccttccttgaccctggaaggtgccactcccac
tgtcctttcctaataaaatgaggaaattgcatcgcattgtctgagtaggtgtcattctattctggggg
gtggggtggggcaggacagcaagggggaggattgggaagacaatagcaggcatgctggggatgcggtg
ggctctatggcttctgaggcggaaagaaccagctggggctctagggggtatccccacgcgccctgtag
cggcgcattaagcgcggcgggtgtggtggttacgcgcagcgtgaccgctacacttgccagcgccctag
cgcccgctcctttcgctttcttcccttcctttctcgccacgttcgccggctttccccgtcaagctcta
aatcgggggctccctttagggttccgatttagtgctttacggcacctcgaccccaaaaaacttgatta
gggtgatggttcacgtagtgggccatcgccctgatagacggtttttcgccctttgacgttggagtcca
cgttctttaatagtggactcttgttccaaactggaacaacactcaaccctatctcggtctattctttt
gatttataagggattttgccgatttcggcctattggttaaaaaatgagctgatttaacaaaaatttaa
cgcgaattaattctgtggaatgtgtgtcagttagggtgtggaaagtccccaggctccccagcaggcag
aagtatgcaaagcatgcatctcaattagtcagcaaccaggtgtggaaagtccccaggctccccagcag
gcagaagtatgcaaagcatgcatctcaattagtcagcaaccatagtcccgcccctaactccgcccatc
ccgcccctaactccgcccagttccgcccattctccgccccatggctgactaattttttttatttatgc
agaggccgaggccgcctctgcctctgagctattccagaagtagtgaggaggcttttttggaggcctag
gcttttgcaaaaagctcccgggagcttgtatatccattttcggatctgatcaagagacaggatgagga
tcgtttcgcatgattgaacaagatggattgcacgcaggttctccggccgcttgggtggagaggctatt
cggctatgactgggcacaacagacaatcggctgctctgatgccgccgtgttccggctgtcagcgcagg
ggcgcccggttctttttgtcaagaccgacctgtccggtgccctgaatgaactgcaggacgaggcagcg
cggctatcgtggctggccacgacgggcgttccttgcgcagctgtgctcgacgttgtcactgaagcggg
aagggactggctgctattgggcgaagtgccggggcaggatctcctgtcatctcaccttgctcctgccg
agaaagtatccatcatggctgatgcaatgcggcggctgcatacgcttgatccggctacctgcccattc
gaccaccaagcgaaacatcgcatcgagcgagcacgtactcggatggaagccggtcttgtcgatcagga
tgatctggacgaagagcatcaggggctcgcgccagccgaactgttcgccaggctcaaggcgcgcatgc
ccgacggcgaggatctcgtcgtgacccatggcgatgcctgcttgccgaatatcatggtggaaaatggc
cgcttttctggattcatcgactgtggccggctgggtgtggcggaccgctatcaggacatagcgttggc
tacccgtgatattgctgaagagcttggcggcgaatgggctgaccgcttcctcgtgctttacggtatcg
ccgctcccgattcgcagcgcatcgccttctatcgccttcttgacgagttcttctgagcgggactctgg
ggttcgaaatgaccgaccaagcgacgcccaacctgccatcacgagatttcgattccaccgccgccttc
tatgaaaggttgggcttcggaatcgttttccgggacgccggctggatgatcctccagcgcggggatct
catgctggagttcttcgcccaccccaacttgtttattgcagcttataatggttacaaataaagcaata
gcatcacaaatttcacaaataaagcatttttttcactgcattctagttgtggtttgtccaaactcatc
aatgtatcttatcatgtctgtataccgtcgacctctagctagagcttggcgtaatcatggtcatagct
gtttcctgtgtgaaattgttatccgctcacaattccacacaacatacgagccggaagcataaagtgta
aagcctggggtgcctaatgagtgagctaactcacattaattgcgttgcgctcactgcccgctttccag
tcgggaaacctgtcgtgccagctgcattaatgaatcggccaacgcgcggggagaggcggtttgcgtat
tgggcgctcttccgcttcctcgctcactgactcgctgcgctcggtcgttcggctgcggcgagcggtat
cagctcactcaaaggcggtaatacggttatccacagaatcaggggataacgcaggaaagaacatgtga
gcaaaaggccagcaaaaggccaggaaccgtaaaaaggccgcgttgctggcgtttttccataggctccg
cccccctgacgagcatcacaaaaatcgacgctcaagtcagaggtggcgaaacccgacaggactataaa
gataccaggcgtttccccctggaagctccctcgtgcgctctcctgttccgaccctgccgcttaccgga
tacctgtccgcctttctcccttcgggaagcgtggcgctttctcatagctcacgctgtaggtatctcag
ttcggtgtaggtcgttcgctccaagctgggctgtgtgcacgaaccccccgttcagcccgaccgctgcg
ccttatccggtaactatcgtcttgagtccaacccggtaagacacgacttatcgccactggcagcagcc
actggtaacaggattagcagagcgaggtatgtaggcggtgctacagagttcttgaagtggtggcctaa
ctacggctacactagaagaacagtatttggtatctgcgctctgctgaagccagttaccttcggaaaaa
gagttggtagctcttgatccggcaaacaaaccaccgctggtagcggtggtttttttgtttgcaagcag
cagattacgcgcagaaaaaaaggatctcaagaagatcctttgatcttttctacggggtctgacgctca
gtggaacgaaaactcacgttaagggattttggtcatgagattatcaaaaaggatcttcacctagatcc
ttttaaattaaaaatgaagttttaaatcaatctaaagtatatatgagtaaacttggtctgacagttac
caatgcttaatcagtgaggcacctatctcagcgatctgtctatttcgttcatccatagttgcctgact
ccccgtcgtgtagataactacgatacgggagggcttaccatctggccccagtgctgcaatgataccgc
gagacccacgctcaccggctccagatttatcagcaataaaccagccagccggaagggccgagcgcaga
agtggtcctgcaactttatccgcctccatccagtctattaattgttgccgggaagctagagtaagtag
ttcgccagttaatagtttgcgcaacgttgttgccattgctacaggcatcgtggtgtcacgctcgtcgt
ttggtatggcttcattcagctccggttcccaacgatcaaggcgagttacatgatcccccatgttgtgc
aaaaaagcggttagctccttcggtcctccgatcgttgtcagaagtaagttggccgcagtgttatcact
catggttatggcagcactgcataattctcttactgtcatgccatccgtaagatgcttttctgtgactg
gtgagtactcaaccaagtcattctgagaatagtgtatgcggcgaccgagttgctcttgcccggcgtca
atacgggataataccgcgccacatagcagaactttaaaagtgctcatcattggaaaacgttcttcggg
gcgaaaactctcaaggatcttaccgctgttgagatccagttcgatgtaacccactcgtgcacccaact
gatcttcagcatcttttactttcaccagcgtttctgggtgagcaaaaacaggaaggcaaaatgccgca
aaaaagggaataagggcgacacggaaatgttgaatactcatactcttcctttttcaatattattgaag
catttatcagggttattgtctcatgagcggatacatatttgaatgtatttagaaaaataaacaaatag
gggttccgcgcacatttccccgaaaagtgccacctgacgtc
PVP37 SARSCOV Pseudovirus spike deltaC 19
(SEQ ID NO: 43)
gacggatcgggagatctcccgatcccctatggtgcactctcagtacaatctgctctgatgccgcatag
ttaagccagtatctgctccctgcttgtgtgttggaggtcgctgagtagtgcgcgagcaaaatttaagc
tacaacaaggcaaggcttgaccgacaattgcatgaagaatctgcttagggttaggcgttttgcgctgc
ttcgcgatgtacgggccagatatacgcgttgacattgattattgactagttattaatagtaatcaatt
acggggtcattagttcatagcccatatatggagttccgcgttacataacttacggtaaatggcccgcc
tggctgaccgcccaacgacccccgcccattgacgtcaataatgacgtatgttcccatagtaacgccaa
tagggactttccattgacgtcaatgggtggagtatttacggtaaactgcccacttggcagtacatcaa
gtgtatcatatgccaagtacgccccctattgacgtcaatgacggtaaatggcccgcctggcattatgc
ccagtacatgaccttatgggactttcctacttggcagtacatctacgtattagtcatcgctattacca
tggtgatgcggttttggcagtacatcaatgggcgtggatagcggtttgactcacggggatttccaagt
ctccaccccattgacgtcaatgggagtttgttttggcaccaaaatcaacgggactttccaaaatgtcg
taacaactccgccccattgacgcaaatgggcggtaggcgtgtacggtgggaggtctatataagcagag
ctctctggctaactagagaacccactgcttactggcttatcgaaattaatacgactcactatagggag
acccaagctggctagccaccATgTTCATCTTCCTGCTGTTCCTGACCCTGACCTCTGGCTCTGACCTG
GACAGGTGTACCACCTTTGATGATGTCCAGGCTCCAAACTACACCCAACACACCTCCAGTATGAGGGG
AGTCTACTACCCTGATGAGATTTTCAGGTCTGACACCCTCTACCTGACCCAGGACCTGTTCCTGCCAT
TCTACAGCAATGTGACAGGCTTCCACACCATCAACCACACCTTTGACAACCCTGTGATTCCATTCAAG
GATGGCATCTACTTTGCTGCCACAGAGAAGAGCAATGTGGTGAGGGGCTGGGTGTTTGGCAGCACAAT
GAACAACAAGAGCCAGTCTGTGATTATCATCAACAACAGCACCAATGTGGTGATTAGGGCTTGTAACT
TTGAACTGTGTGACAACCCATTCTTTGCTGTGAGCAAGCCTATGGGCACCCAGACCCACACAATGATT
TTTGACAATGCCTTCAACTGTACCTTTGAATACATCTCTGATGCCTTCTCCCTGGATGTGTCTGAGAA
GTCTGGCAACTTCAAACACCTGAGGGAGTTTGTGTTCAAGAACAAGGATGGCTTCCTCTATGTCTACA
AGGGCTACCAACCAATTGATGTGGTGAGGGACCTGCCATCTGGCTTCAACACCCTGAAACCAATCTTC
AAACTGCCACTGGGCATCAACATCACCAACTTCAGGGCTATCCTGACAGCCTTCAGCCCTGCCCAGGA
CACCTGGGGCACCTCTGCTGCTGCCTACTTTGTGGGCTACCTGAAACCAACCACCTTTATGCTGAAAT
ATGATGAGAATGGCACCATCACAGATGCTGTGGACTGTAGCCAGAACCCACTGGCTGAACTGAAATGT
TCTGTGAAGTCCTTTGAGATTGACAAGGGCATCTACCAGACCAGCAACTTCAGGGTGGTGCCATCTGG
AGATGTGGTGAGGTTTCCAAACATCACCAACCTGTGTCCATTTGGAGAGGTGTTCAATGCCACCAAGT
TTCCATCTGTCTATGCCTGGGAGAGGAAGAAGATTAGCAACTGTGTGGCTGACTACTCTGTGCTCTAC
AACAGCACCTTCTTCAGCACCTTCAAGTGTTATGGAGTGTCTGCCACCAAACTGAATGACCTGTGTTT
CAGCAATGTCTATGCTGACTCCTTTGTGGTGAAGGGAGATGATGTGAGACAGATTGCCCCTGGACAAA
CAGGAGTGATTGCTGACTACAACTACAAACTGCCTGATGACTTTATGGGCTGTGTGCTGGCTTGGAAC
ACCAGGAACATTGATGCCACCAGCACAGGCAACTACAACTACAAATACAGATACCTGAGACATGGCAA
ACTGAGACCATTTGAGAGGGACATCAGCAATGTGCCATTCAGCCCTGATGGCAAGCCATGTACTCCTC
CTGCCCTGAACTGTTACTGGCCACTGAATGACTATGGCTTCTACACCACCACAGGCATTGGCTACCAA
CCATACAGGGTGGTGGTGCTGTCCTTTGAACTGCTGAATGCCCCTGCCACAGTGTGTGGACCAAAACT
GAGCACAGACCTGATTAAGAACCAGTGTGTGAACTTCAACTTCAATGGACTGACAGGCACAGGAGTGC
TGACACCATCCAGCAAGAGGTTCCAACCATTCCAACAGTTTGGCAGGGATGTGTCTGACTTCACAGAC
TCTGTGAGGGACCCAAAGACCTCTGAGATTCTGGACATCAGCCCATGTTCCTTTGGAGGAGTGTCTGT
GATTACACCTGGCACCAATGCCTCCTCTGAGGTGGCTGTGCTCTACCAGGATGTGAACTGTACTGATG
TGAGCACAGCCATCCATGCTGACCAACTTACACCTGCCTGGAGGATTTACAGCACAGGCAACAATGTG
TTCCAGACCCAGGCTGGCTGTCTGATTGGAGCAGAGCATGTGGACACCTCCTATGAGTGTGACATCCC
AATTGGAGCAGGCATCTGTGCCTCCTACCACACAGTGTCCCTGCTGAGGAGCACCAGCCAGAAGAGCA
TTGTGGCTTACACAATGAGTCTGGGAGCAGACTCCAGCATTGCCTACAGCAACAACACCATTGCCATC
CCAACCAACTTCAGCATCAGCATCACCACAGAGGTGATGCCTGTGAGTATGGCTAAGACCTCTGTGGA
CTGTAATATGTATATCTGTGGAGACAGCACAGAGTGTGCCAACCTGCTGCTCCAATATGGCTCCTTCT
GTACCCAACTTAACAGGGCTCTGTCTGGCATTGCTGCTGAACAGGACAGGAACACCAGGGAGGTGTTT
GCCCAGGTGAAGCAGATGTATAAGACACCAACCCTGAAATACTTTGGAGGCTTCAACTTCAGCCAGAT
TCTGCCTGACCCACTGAAACCAACCAAGAGGTCCTTCATTGAGGACCTGCTGTTCAACAAGGTGACCC
TGGCTGATGCTGGCTTTATGAAGCAATATGGAGAGTGTCTGGGAGACATCAATGCCAGGGACCTGATT
TGTGCCCAGAAGTTCAATGGACTGACAGTGCTGCCTCCACTGCTGACAGATGATATGATTGCTGCCTA
CACAGCAGCCCTGGTGTCTGGCACAGCCACAGCAGGCTGGACCTTTGGAGCAGGAGCAGCCCTCCAAA
TCCCATTTGCTATGCAGATGGCTTACAGGTTCAATGGCATTGGAGTGACCCAGAATGTGCTCTATGAG
AACCAGAAGCAGATTGCCAACCAGTTCAACAAGGCTATCAGCCAGATTCAGGAGTCCCTGACCACCAC
CAGCACAGCCCTGGGCAAACTCCAAGATGTGGTGAACCAGAATGCCCAGGCTCTGAACACCCTGGTGA
AGCAACTTTCCAGCAACTTTGGAGCCATCTCCTCTGTGCTGAATGACATCCTGAGCAGACTGGACAAG
GTGGAGGCTGAGGTCCAGATTGACAGACTGATTACAGGCAGACTCCAATCCCTCCAAACCTATGTGAC
CCAACAACTTATCAGGGCTGCTGAGATTAGGGCATCTGCCAACCTGGCTGCCACCAAGATGAGTGAGT
GTGTGCTGGGACAAAGCAAGAGGGTGGACTTCTGTGGCAAGGGCTACCACCTGATGAGTTTTCCACAG
GCTGCCCCTCATGGAGTGGTGTTCCTGCATGTGACCTATGTGCCAAGCCAGGAGAGGAACTTCACCAC
AGCCCCTGCCATCTGCCATGAGGGCAAGGCTTACTTTCCAAGGGAGGGAGTGTTTGTGTTCAATGGCA
CCTCCTGGTTCATCACCCAGAGGAACTTCTTCAGCCCACAGATTATCACCACAGACAACACCTTTGTG
TCTGGCAACTGTGATGTGGTGATTGGCATCATCAACAACACAGTCTATGACCCACTCCAACCTGAACT
GGACTCCTTCAAGGAGGAACTGGACAAATACTTCAAGAACCACACCAGCCCTGATGTGGACCTGGGAG
ACATCTCTGGCATCAATGCCTCTGTGGTGAACATCCAGAAGGAGATTGACAGACTGAATGAGGTGGCT
AAGAACCTGAATGAGTCCCTGATTGACCTCCAAGAACTGGGCAAATATGAACAATACATCAAGTGGCC
ATGGTATGTGTGGCTGGGCTTCATTGCTGGACTGATTGCCATTGTGATGGTGACCATCCTGCTGTGTT
GTATGACCTCCTGTTGTTCCTGTCTGAAAGGAGCCTGTTCCTGTGGCTCCTGTTGTTAAggatccgag
ctcggtaccaagcttaagtttaaaccgctgatcagcctcgactgtgccttctagttgccagccatctg
ttgtttgcccctcccccgtgccttccttgaccctggaaggtgccactcccactgtcctttcctaataa
aatgaggaaattgcatcgcattgtctgagtaggtgtcattctattctggggggtggggtggggcagga
cagcaagggggaggattgggaagacaatagcaggcatgctggggatgcggtgggctctatggcttctg
aggcggaaagaaccagctggggctctagggggtatccccacgcgccctgtagcggcgcattaagcgcg
gcgggtgtggtggttacgcgcagcgtgaccgctacacttgccagcgccctagcgcccgctcctttcgc
tttcttcccttcctttctcgccacgttcgccggctttccccgtcaagctctaaatcgggggctccctt
tagggttccgatttagtgctttacggcacctcgaccccaaaaaacttgattagggtgatggttcacgt
agtgggccatcgccctgatagacggtttttcgccctttgacgttggagtccacgttctttaatagtgg
actcttgttccaaactggaacaacactcaaccctatctcggtctattcttttgatttataagggattt
tgccgatttcggcctattggttaaaaaatgagctgatttaacaaaaatttaacgcgaattaattctgt
ggaatgtgtgtcagttagggtgtggaaagtccccaggctccccagcaggcagaagtatgcaaagcatg
catctcaattagtcagcaaccaggtgtggaaagtccccaggctccccagcaggcagaagtatgcaaag
catgcatctcaattagtcagcaaccatagtcccgcccctaactccgcccatcccgcccctaactccgc
ccagttccgcccattctccgccccatggctgactaattttttttatttatgcagaggccgaggccgcc
tctgcctctgagctattccagaagtagtgaggaggcttttttggaggcctaggcttttgcaaaaagct
cccgggagcttgtatatccattttcggatctgatcaagagacaggatgaggatcgtttcgcatgattg
aacaagatggattgcacgcaggttctccggccgcttgggtggagaggctattcggctatgactgggca
caacagacaatcggctgctctgatgccgccgtgttccggctgtcagcgcaggggcgcccggttctttt
tgtcaagaccgacctgtccggtgccctgaatgaactgcaggacgaggcagcgcggctatcgtggctgg
ccacgacgggcgttccttgcgcagctgtgctcgacgttgtcactgaagcgggaagggactggctgcta
ttgggcgaagtgccggggcaggatctcctgtcatctcaccttgctcctgccgagaaagtatccatcat
ggctgatgcaatgcggcggctgcatacgcttgatccggctacctgcccattcgaccaccaagcgaaac
atcgcatcgagcgagcacgtactcggatggaagccggtcttgtcgatcaggatgatctggacgaagag
catcaggggctcgcgccagccgaactgttcgccaggctcaaggcgcgcatgcccgacggcgaggatct
cgtcgtgacccatggcgatgcctgcttgccgaatatcatggtggaaaatggccgcttttctggattca
tcgactgtggccggctgggtgtggcggaccgctatcaggacatagcgttggctacccgtgatattgct
gaagagcttggcggcgaatgggctgaccgcttcctcgtgctttacggtatcgccgctcccgattcgca
gcgcatcgccttctatcgccttcttgacgagttcttctgagcgggactctggggttcgaaatgaccga
ccaagcgacgcccaacctgccatcacgagatttcgattccaccgccgccttctatgaaaggttgggct
tcggaatcgttttccgggacgccggctggatgatcctccagcgcggggatctcatgctggagttcttc
gcccaccccaacttgtttattgcagcttataatggttacaaataaagcaatagcatcacaaatttcac
aaataaagcatttttttcactgcattctagttgtggtttgtccaaactcatcaatgtatcttatcatg
tctgtataccgtcgacctctagctagagcttggcgtaatcatggtcatagctgtttcctgtgtgaaat
tgttatccgctcacaattccacacaacatacgagccggaagcataaagtgtaaagcctggggtgccta
atgagtgagctaactcacattaattgcgttgcgctcactgcccgctttccagtcgggaaacctgtcgt
gccagctgcattaatgaatcggccaacgcgcggggagaggcggtttgcgtattgggcgctcttccgct
tcctcgctcactgactcgctgcgctcggtcgttcggctgcggcgagcggtatcagctcactcaaaggc
ggtaatacggttatccacagaatcaggggataacgcaggaaagaacatgtgagcaaaaggccagcaaa
aggccaggaaccgtaaaaaggccgcgttgctggcgtttttccataggctccgcccccctgacgagcat
cacaaaaatcgacgctcaagtcagaggtggcgaaacccgacaggactataaagataccaggcgtttcc
ccctggaagctccctcgtgcgctctcctgttccgaccctgccgcttaccggatacctgtccgcctttc
tcccttcgggaagcgtggcgctttctcatagctcacgctgtaggtatctcagttcggtgtaggtcgtt
cgctccaagctgggctgtgtgcacgaaccccccgttcagcccgaccgctgcgccttatccggtaacta
tcgtcttgagtccaacccggtaagacacgacttatcgccactggcagcagccactggtaacaggatta
gcagagcgaggtatgtaggcggtgctacagagttcttgaagtggtggcctaactacggctacactaga
agaacagtatttggtatctgcgctctgctgaagccagttaccttcggaaaaagagttggtagctcttg
atccggcaaacaaaccaccgctggtagcggtggtttttttgtttgcaagcagcagattacgcgcagaa
aaaaaggatctcaagaagatcctttgatcttttctacggggtctgacgctcagtggaacgaaaactca
cgttaagggattttggtcatgagattatcaaaaaggatcttcacctagatccttttaaattaaaaatg
aagttttaaatcaatctaaagtatatatgagtaaacttggtctgacagttaccaatgcttaatcagtg
aggcacctatctcagcgatctgtctatttcgttcatccatagttgcctgactccccgtcgtgtagata
actacgatacgggagggcttaccatctggccccagtgctgcaatgataccgcgagacccacgctcacc
ggctccagatttatcagcaataaaccagccagccggaagggccgagcgcagaagtggtcctgcaactt
tatccgcctccatccagtctattaattgttgccgggaagctagagtaagtagttcgccagttaatagt
ttgcgcaacgttgttgccattgctacaggcatcgtggtgtcacgctcgtcgtttggtatggcttcatt
cagctccggttcccaacgatcaaggcgagttacatgatcccccatgttgtgcaaaaaagcggttagct
ccttcggtcctccgatcgttgtcagaagtaagttggccgcagtgttatcactcatggttatggcagca
ctgcataattctcttactgtcatgccatccgtaagatgcttttctgtgactggtgagtactcaaccaa
gtcattctgagaatagtgtatgcggcgaccgagttgctcttgcccggcgtcaatacgggataataccg
cgccacatagcagaactttaaaagtgctcatcattggaaaacgttcttcggggcgaaaactctcaagg
atcttaccgctgttgagatccagttcgatgtaacccactcgtgcacccaactgatcttcagcatcttt
tactttcaccagcgtttctgggtgagcaaaaacaggaaggcaaaatgccgcaaaaaagggaataaggg
cgacacggaaatgttgaatactcatactcttcctttttcaatattattgaagcatttatcagggttat
tgtctcatgagcggatacatatttgaatgtatttagaaaaataaacaaataggggttccgcgcacatt
tccccgaaaagtgccacctgacgtc
pVP38 MERSCoV Pseudovirus spike deltaC-16
(SEQ ID NO: 44)
gacggatcgggagatctcccgatcccctatggtgcactctcagtacaatctgctctgatgccgcatag
ttaagccagtatctgctccctgcttgtgtgttggaggtcgctgagtagtgcgcgagcaaaatttaagc
tacaacaaggcaaggcttgaccgacaattgcatgaagaatctgcttagggttaggcgttttgcgctgc
ttcgcgatgtacgggccagatatacgcgttgacattgattattgactagttattaatagtaatcaatt
acggggtcattagttcatagcccatatatggagttccgcgttacataacttacggtaaatggcccgcc
tggctgaccgcccaacgacccccgcccattgacgtcaataatgacgtatgttcccatagtaacgccaa
tagggactttccattgacgtcaatgggtggagtatttacggtaaactgcccacttggcagtacatcaa
gtgtatcatatgccaagtacgccccctattgacgtcaatgacggtaaatggcccgcctggcattatgc
ccagtacatgaccttatgggactttcctacttggcagtacatctacgtattagtcatcgctattacca
tggtgatgcggttttggcagtacatcaatgggcgtggatagcggtttgactcacggggatttccaagt
ctccaccccattgacgtcaatgggagtttgttttggcaccaaaatcaacgggactttccaaaatgtcg
taacaactccgccccattgacgcaaatgggcggtaggcgtgtacggtgggaggtctatataagcagag
ctctctggctaactagagaacccactgcttactggcttatcgaaattaatacgactcactatagggag
acccaagctggctagccaccATgATTCACTCTGTGTTCCTGCTGATGTTCCTGCTGACACCAACAGAG
TCCTATGTGGATGTGGGACCTGACTCTGTGAAGTCTGCCTGTATTGAGGTGGACATCCAACAGACCTT
CTTTGACAAGACCTGGCCAAGACCAATTGATGTGAGCAAGGCTGATGGCATCATCTACCCACAGGGCA
GGACCTACAGCAACATCACCATCACCTACCAGGGACTGTTTCCATACCAGGGAGATCATGGAGATATG
TATGTCTACTCTGCTGGTCATGCCACAGGCACCACACCACAGAAACTGTTTGTGGCTAACTACAGCCA
GGATGTGAAGCAGTTTGCCAATGGCTTTGTGGTGAGGATTGGAGCAGCAGCCAACAGCACAGGCACAG
TGATTATCAGCCCAAGCACCTCTGCCACCATCAGGAAGATTTACCCTGCCTTTATGCTGGGCTCCTCT
GTGGGCAACTTCTCTGATGGCAAGATGGGCAGGTTCTTCAACCACACCCTGGTGCTGCTGCCTGATGG
CTGTGGCACCCTGCTGAGGGCTTTCTACTGTATCTTGGAACCAAGGTCTGGCAACCACTGTCCTGCTG
GCAACTCCTACACCTCCTTTGCCACCTACCACACACCTGCCACAGACTGTTCTGATGGCAACTACAAC
AGGAATGCCTCCCTGAACTCCTTCAAGGAATACTTCAACCTGAGGAACTGTACCTTTATGTACACCTA
CAACATCACAGAGGATGAGATTTTGGAGTGGTTTGGCATCACCCAGACAGCCCAGGGAGTGCATCTGT
TCTCGAGCAGATATGTGGACCTCTATGGAGGCAATATGTTCCAGTTTGCCACCCTGCCTGTCTATGAC
ACCATCAAATACTACAGCATCATCCCACACAGCATCAGGAGCATCCAGTCTGACAGGAAGGCTTGGGC
TGCCTTCTATGTCTACAAACTCCAACCACTGACCTTCCTGCTGGACTTCTCTGTGGATGGCTACATCA
GGAGGGCTATTGACTGTGGCTTCAATGACCTGAGCCAACTTCACTGTTCCTATGAGTCCTTTGATGTG
GAGTCTGGAGTCTACTCTGTGTCCTCCTTTGAGGCTAAGCCATCTGGCTCTGTGGTGGAACAGGCTGA
GGGAGTGGAGTGTGACTTCAGCCCACTGCTGTCTGGCACACCTCCACAGGTCTACAACTTCAAGAGAC
TGGTGTTCACCAACTGTAACTACAACCTGACCAAACTGCTGTCCCTGTTCTCTGTGAATGACTTCACT
TGTAGCCAGATTAGCCCTGCTGCCATTGCCAGCAACTGTTACTCCTCCCTGATTCTGGACTACTTCTC
CTACCCACTGAGTATGAAGTCTGACCTGTCTGTGTCCTCTGCTGGACCAATCAGCCAGTTCAACTACA
AGCAGTCCTTCAGCAACCCAACTTGTCTGATTCTGGCTACAGTGCCACACAACCTGACCACCATCACC
AAGCCACTGAAATACTCCTACATCAACAAGTGTAGCAGACTGCTGTCTGATGACAGGACAGAGGTGCC
ACAACTAGTGAATGCCAACCAATACAGCCCATGTGTGAGCATTGTGCCAAGCACAGTGTGGGAGGATG
GAGACTACTACAGGAAGCAACTTAGCCCATTGGAGGGAGGAGGCTGGCTGGTGGCATCTGGCAGCACA
GTGGCTATGACAGAACAACTCCAAATGGGCTTTGGCATCACAGTCCAATATGGCACAGACACCAACTC
TGTGTGTCCAAAATTGGAGTTTGCCAATGACACCAAGATTGCCAGCCAACTTGGCAACTGTGTGGAAT
ACTCCCTCTATGGAGTGTCTGGCAGGGGAGTGTTCCAGAACTGTACTGCTGTGGGAGTGAGACAACAG
AGGTTTGTCTATGATGCCTACCAGAACCTGGTGGGCTACTACTCTGATGATGGCAACTACTACTGTCT
GAGGGCTTGTGTGTCTGTGCCTGTGTCTGTGATTTATGACAAGGAGACCAAGACCCATGCCACCCTGT
TTGGCTCTGTGGCTTGTGAACACATCTCCAGCACAATGAGTCAATACAGCAGGAGCACCAGGAGTATG
CTGAAAAGGAGGGACAGCACATATGGACCACTCCAAACACCTGTGGGCTGTGTGCTGGGACTGGTGAA
CTCCTCCCTGTTTGTGGAGGACTGTAAACTGCCACTGGGACAATCCCTGTGTGCCCTGCCTGACACAC
CAAGCACCCTGACACCAAGGTCTGTGAGGTCTGTGCCTGGAGAGATGAGACTGGCAAGCATTGCCTTC
AACCACCCAATCCAGGTGGACCAACTTAACTCCTCCTACTTCAAACTGAGCATCCCAACCAACTTCTC
CTTTGGAGTGACCCAGGAATACATCCAGACCACCATCCAGAAGGTGACAGTGGACTGTAAGCAATATG
TGTGTAATGGCTTCCAGAAGTGTGAACAACTTCTGAGGGAATATGGACAATTCTGTAGCAAGATAAAC
CAGGCTCTTCATGGAGCCAACCTGAGACAGGATGACTCTGTGAGGAACCTGTTTGCCTCTGTGAAGTC
CAGCCAGTCCAGCCCAATCATCCCTGGCTTTGGAGGAGACTTCAACCTGACCCTGTTGGAACCGGTGA
GCATCAGCACAGGCAGCAGGTCTGCCAGGTCTGCCATTGAGGACCTGCTGTTTGACAAGGTGACCATT
GCTGACCCTGGCTATATGCAGGGCTATGATGACTGTATGCAACAGGGACCTGCCTCTGCCAGGGACCT
GATTTGTGCCCAATATGTGGCTGGCTACAAGGTGCTGCCTCCACTGATGGATGTGAATATGGAGGCTG
CCTACACCTCCTCCCTGCTGGGCAGCATTGCTGGAGTGGGCTGGACTGCAGGACTGTCCTCCTTTGCT
GCCATCCCATTTGCCCAGAGCATCTTCTACAGACTGAATGGAGTGGGCATCACCCAACAGGTGCTGTC
TGAGAACCAGAAACTGATTGCCAACAAGTTCAACCAGGCTCTGGGAGCTATGCAGACAGGCTTCACCA
CCACCAATGAGGCTTTCCAGAAGGTCCAGGATGCTGTGAACAACAATGCCCAGGCTCTGAGCAAACTG
GCATCTGAACTGAGCAACACCTTTGGAGCCATCTCTGCTAGCATTGGAGACATCATCCAGAGACTGGA
TGTGTTGGAACAGGATGCCCAGATTGACAGACTGATAAATGGCAGACTGACCACCCTGAATGCCTTTG
TGGCTCAACAACTTGTGAGGTCTGAGTCTGCTGCCCTGTCTGCCCAACTTGCCAAGGACAAGGTGAAT
GAGTGTGTGAAGGCTCAAAGCAAGAGGTCTGGCTTCTGTGGACAAGGCACCCACATTGTGTCCTTTGT
GGTGAATGCCCCAAATGGACTCTACTTTATGCATGTGGGCTACTACCCAAGCAACCACATTGAGGTGG
TGTCTGCCTATGGACTGTGTGATGCTGCCAACCCAACCAACTGTATTGCCCCTGTGAATGGCTACTTC
ATCAAGACCAACAACACCAGGATTGTGGATGAGTGGTCCTACACAGGCTCCTCCTTCTATGCCCCTGA
ACCAATCACCTCCCTGAACACCAAATATGTGGCTCCACAGGTGACCTACCAGAACATCAGCACCAACC
TGCCTCCTCCACTGCTGGGCAACAGCACAGGCATTGACTTCCAGGATGAACTGGATGAGTTCTTCAAG
AATGTGAGCACCAGCATCCCAAACTTTGGCTCCCTGACCCAGATAAACACCACCCTGCTGGACCTGAC
CTATGAGATGCTGTCCCTCCAACAGGTGGTGAAGGCTCTGAATGAGTCCTACATTGACCTGAAAGAAC
TGGGCAACTACACCTACTACAACAAGTGGCCATGGTACATCTGGCTGGGCTTCATCGCTGGCCTGGTG
GCCCTGGCGCTGTGCGTGTTCTTCATCCTGTGCTGCACCGGCTGCGGCACCAACTGCATGGGCAAGCT
GAAGTGCAACAGGTGCTGCTAAggatccgagctcggtaccaagcttaagtttaaaccgctgatcagcc
tcgactgtgccttctagttgccagccatctgttgtttgcccctcccccgtgccttccttgaccctgga
aggtgccactcccactgtcctttcctaataaaatgaggaaattgcatcgcattgtctgagtaggtgtc
attctattctggggggtggggtggggcaggacagcaagggggaggattgggaagacaatagcaggcat
gctggggatgcggtgggctctatggcttctgaggcggaaagaaccagctggggctctagggggtatcc
ccacgcgccctgtagcggcgcattaagcgcggcgggtgtggtggttacgcgcagcgtgaccgctacac
ttgccagcgccctagcgcccgctcctttcgctttcttcccttcctttctcgccacgttcgccggcttt
ccccgtcaagctctaaatcgggggctccctttagggttccgatttagtgctttacggcacctcgaccc
caaaaaacttgattagggtgatggttcacgtagtgggccatcgccctgatagacggtttttcgccctt
tgacgttggagtccacgttctttaatagtggactcttgttccaaactggaacaacactcaaccctatc
tcggtctattcttttgatttataagggattttgccgatttcggcctattggttaaaaaatgagctgat
ttaacaaaaatttaacgcgaattaattctgtggaatgtgtgtcagttagggtgtggaaagtccccagg
ctccccagcaggcagaagtatgcaaagcatgcatctcaattagtcagcaaccaggtgtggaaagtccc
caggctccccagcaggcagaagtatgcaaagcatgcatctcaattagtcagcaaccatagtcccgccc
ctaactccgcccatcccgcccctaactccgcccagttccgcccattctccgccccatggctgactaat
tttttttatttatgcagaggccgaggccgcctctgcctctgagctattccagaagtagtgaggaggct
tttttggaggcctaggcttttgcaaaaagctcccgggagcttgtatatccattttcggatctgatcaa
gagacaggatgaggatcgtttcgcatgattgaacaagatggattgcacgcaggttctccggccgcttg
ggtggagaggctattcggctatgactgggcacaacagacaatcggctgctctgatgccgccgtgttcc
ggctgtcagcgcaggggcgcccggttctttttgtcaagaccgacctgtccggtgccctgaatgaactg
caggacgaggcagcgcggctatcgtggctggccacgacgggcgttccttgcgcagctgtgctcgacgt
tgtcactgaagcgggaagggactggctgctattgggcgaagtgccggggcaggatctcctgtcatctc
accttgctcctgccgagaaagtatccatcatggctgatgcaatgcggcggctgcatacgcttgatccg
gctacctgcccattcgaccaccaagcgaaacatcgcatcgagcgagcacgtactcggatggaagccgg
tcttgtcgatcaggatgatctggacgaagagcatcaggggctcgcgccagccgaactgttcgccaggc
tcaaggcgcgcatgcccgacggcgaggatctcgtcgtgacccatggcgatgcctgcttgccgaatatc
atggtggaaaatggccgcttttctggattcatcgactgtggccggctgggtgtggcggaccgctatca
ggacatagcgttggctacccgtgatattgctgaagagcttggcggcgaatgggctgaccgcttcctcg
tgctttacggtatcgccgctcccgattcgcagcgcatcgccttctatcgccttcttgacgagttcttc
tgagcgggactctggggttcgaaatgaccgaccaagcgacgcccaacctgccatcacgagatttcgat
tccaccgccgccttctatgaaaggttgggcttcggaatcgttttccgggacgccggctggatgatcct
ccagcgcggggatctcatgctggagttcttcgcccaccccaacttgtttattgcagcttataatggtt
acaaataaagcaatagcatcacaaatttcacaaataaagcatttttttcactgcattctagttgtggt
ttgtccaaactcatcaatgtatcttatcatgtctgtataccgtcgacctctagctagagcttggcgta
atcatggtcatagctgtttcctgtgtgaaattgttatccgctcacaattccacacaacatacgagccg
gaagcataaagtgtaaagcctggggtgcctaatgagtgagctaactcacattaattgcgttgcgctca
ctgcccgctttccagtcgggaaacctgtcgtgccagctgcattaatgaatcggccaacgcgcggggag
aggcggtttgcgtattgggcgctcttccgcttcctcgctcactgactcgctgcgctcggtcgttcggc
tgcggcgagcggtatcagctcactcaaaggcggtaatacggttatccacagaatcaggggataacgca
ggaaagaacatgtgagcaaaaggccagcaaaaggccaggaaccgtaaaaaggccgcgttgctggcgtt
tttccataggctccgcccccctgacgagcatcacaaaaatcgacgctcaagtcagaggtggcgaaacc
cgacaggactataaagataccaggcgtttccccctggaagctccctcgtgcgctctcctgttccgacc
ctgccgcttaccggatacctgtccgcctttctcccttcgggaagcgtggcgctttctcatagctcacg
ctgtaggtatctcagttcggtgtaggtcgttcgctccaagctgggctgtgtgcacgaaccccccgttc
agcccgaccgctgcgccttatccggtaactatcgtcttgagtccaacccggtaagacacgacttatcg
ccactggcagcagccactggtaacaggattagcagagcgaggtatgtaggcggtgctacagagttctt
gaagtggtggcctaactacggctacactagaagaacagtatttggtatctgcgctctgctgaagccag
ttaccttcggaaaaagagttggtagctcttgatccggcaaacaaaccaccgctggtagcggtggtttt
tttgtttgcaagcagcagattacgcgcagaaaaaaaggatctcaagaagatcctttgatcttttctac
ggggtctgacgctcagtggaacgaaaactcacgttaagggattttggtcatgagattatcaaaaagga
tcttcacctagatccttttaaattaaaaatgaagttttaaatcaatctaaagtatatatgagtaaact
tggtctgacagttaccaatgcttaatcagtgaggcacctatctcagcgatctgtctatttcgttcatc
catagttgcctgactccccgtcgtgtagataactacgatacgggagggcttaccatctggccccagtg
ctgcaatgataccgcgagacccacgctcaccggctccagatttatcagcaataaaccagccagccgga
agggccgagcgcagaagtggtcctgcaactttatccgcctccatccagtctattaattgttgccggga
agctagagtaagtagttcgccagttaatagtttgcgcaacgttgttgccattgctacaggcatcgtgg
tgtcacgctcgtcgtttggtatggcttcattcagctccggttcccaacgatcaaggcgagttacatga
tcccccatgttgtgcaaaaaagcggttagctccttcggtcctccgatcgttgtcagaagtaagttggc
cgcagtgttatcactcatggttatggcagcactgcataattctcttactgtcatgccatccgtaagat
gcttttctgtgactggtgagtactcaaccaagtcattctgagaatagtgtatgcggcgaccgagttgc
tcttgcccggcgtcaatacgggataataccgcgccacatagcagaactttaaaagtgctcatcattgg
aaaacgttcttcggggcgaaaactctcaaggatcttaccgctgttgagatccagttcgatgtaaccca
ctcgtgcacccaactgatcttcagcatcttttactttcaccagcgtttctgggtgagcaaaaacagga
aggcaaaatgccgcaaaaaagggaataagggcgacacggaaatgttgaatactcatactcttcctttt
tcaatattattgaagcatttatcagggttattgtctcatgagcggatacatatttgaatgtatttaga
aaaataaacaaataggggttccgcgcacatttccccgaaaagtgccacctgacgtc
PVP40 SARS-COV-2 spike delta variant del 19
(SEQ ID NO: 45)
gacggatcgggagatctcccgatcccctatggtgcactctcagtacaatctgctctgatgccgcatag
ttaagccagtatctgctccctgcttgtgtgttggaggtcgctgagtagtgcgcgagcaaaatttaagc
tacaacaaggcaaggcttgaccgacaattgcatgaagaatctgcttagggttaggcgttttgcgctgc
ttcgcgatgtacgggccagatatacgcgttgacattgattattgactagttattaatagtaatcaatt
acggggtcattagttcatagcccatatatggagttccgcgttacataacttacggtaaatggcccgcc
tggctgaccgcccaacgacccccgcccattgacgtcaataatgacgtatgttcccatagtaacgccaa
tagggactttccattgacgtcaatgggtggagtatttacggtaaactgcccacttggcagtacatcaa
gtgtatcatatgccaagtacgccccctattgacgtcaatgacggtaaatggcccgcctggcattatgc
ccagtacatgaccttatgggactttcctacttggcagtacatctacgtattagtcatcgctattacca
tggtgatgcggttttggcagtacatcaatgggcgtggatagcggtttgactcacggggatttccaagt
ctccaccccattgacgtcaatgggagtttgttttggcaccaaaatcaacgggactttccaaaatgtcg
taacaactccgccccattgacgcaaatgggcggtaggcgtgtacggtgggaggtctatataagcagag
ctctctggctaactagagaacccactgcttactggcttatcgaaattaatacgactcactatagggag
acccaagctggctagccaccATGTTTGTGTTCCTGGTGCTGCTGCCACTGGTGTCCAGCCAGTGTGTG
AACCTGAGGACCAGGACCCAACTTCCTCCTGCCTACACCAACTCCTTCACCAGGGGAGTCTACTACCC
TGACAAGGTGTTCAGGTCCTCTGTGCTGCACAGCACCCAGGACCTGTTCCTGCCATTCTTCAGCAATG
TGACCTGGTTCCATGCCATCCATGTGTCTGGCACCAATGGCACCAAGAGGTTTGACAACCCTGTGCTG
CCATTCAATGATGGAGTCTACTTTGCCAGCACAGAGAAGAGCAACATCATCAGGGGCTGGATTTTTGG
CACCACCCTGGACAGCAAGACCCAGTCCCTGCTGATTGTGAACAATGCCACCAATGTGGTGATTAAGG
TGTGTGAGTTCCAGTTCTGTAATGACCCATTCCTGGACGTCTACTACCACAAGAACAACAAGTCCTGG
ATGGAGTCTGGCGTCTACTCCTCTGCCAACAACTGTACCTTTGAATATGTGAGCCAACCATTCCTGAT
GGACTTGGAGGGCAAGCAGGGCAACTTCAAGAACCTGAGGGAGTTTGTGTTCAAGAACATTGATGGCT
ACTTCAAGATTTACAGCAAACACACACCAATCAACCTGGTGAGGGACCTGCCACAGGGCTTCTCTGCC
TTGGAACCACTGGTGGACCTGCCAATTGGCATCAACATCACCAGGTTCCAGACCCTGCTGGCTCTGCA
CAGGTCCTACCTGACACCTGGAGACTCCTCCTCTGGCTGGACAGCAGGAGCAGCAGCCTACTATGTGG
GCTACCTCCAACCAAGGACCTTCCTGCTGAAATACAATGAGAATGGCACCATCACAGATGCTGTGGAC
TGTGCCCTGGACCCACTGTCTGAGACCAAGTGTACCCTGAAATCCTTCACAGTGGAGAAGGGCATCTA
CCAGACCAGCAACTTCAGGGTCCAACCAACAGAGAGCATTGTGAGGTTTCCAAACATCACAAACCTGT
GTCCATTTGGAGAGGTGTTCAATGCCACCAGGTTTGCCTCTGTCTATGCCTGGAACAGGAAGAGGATT
AGCAACTGTGTGGCTGACTACTCTGTGCTCTACAACTCTGCCTCCTTCAGCACCTTCAAGTGTTATGG
AGTGAGCCCAACCAAACTGAATGACCTGTGTTTCACCAATGTCTATGCTGACTCCTTTGTGATTAGGG
GAGATGAGGTGAGACAGATTGCCCCTGGACAAACAGGCAAGATTGCTGACTACAACTACAAACTGCCT
GATGACTTCACAGGCTGTGTGATTGCCTGGAACAGCAACAACCTGGACAGCAAGGTGGGAGGCAACTA
CAACTACAGGTACAGACTGTTCAGGAAGAGCAACCTGAAACCATTTGAGAGGGACATCAGCACAGAGA
TTTACCAGGCTGGCAGCAAGCCATGTAATGGAGTGGAGGGCTTCAACTGTTACTTTCCACTCCAATCC
TATGGCTTCCAACCAACCAATGGAGTGGGCTACCAACCATACAGGGTGGTGGTGCTGTCCTTTGAACT
GCTCCATGCCCCTGCCACAGTGTGTGGACCAAAGAAGAGCACAAACCTGGTGAAGAACAAGTGTGTGA
ACTTCAACTTCAATGGACTGACAGGCACAGGAGTGCTGACAGAGAGCAACAAGAAGTTCCTGCCATTC
CAACAGTTTGGCAGGGACATTGCTGACACCACAGATGCTGTGAGGGACCCACAGACCTTGGAGATTCT
GGACATCACACCATGTTCCTTTGGAGGAGTGTCTGTGATTACACCTGGCACCAACACCAGCAACCAGG
TGGCTGTGCTCTACCAGGGCGTGAACTGTACTGAGGTGCCTGTGGCTATCCATGCTGACCAACTTACC
CCAACCTGGAGGGTCTACAGCACAGGCAGCAACGTGTTCCAGACCAGGGCTGGCTGTCTGATTGGAGC
AGAGCATGTGAACAACTCCTATGAGTGTGACATCCCAATTGGAGCAGGCATCTGTGCCTCCTACCAGA
CCCAGACCAACAGCAGGAGGAGGGCAAGGTCTGTGGCAAGCCAGAGCATCATTGCCTACACAATGAGT
CTGGGAGCAGAGAACTCTGTGGCTTACAGCAACAACAGCATTGCCATCCCAACCAACTTCACCATCTC
TGTGACCACAGAGATTCTGCCTGTGAGTATGACCAAGACCTCTGTGGACTGTACAATGTATATCTGTG
GAGACAGCACAGAGTGTAGCAACCTGCTGCTCCAATATGGCTCCTTCTGTACCCAACTTAACAGGGCT
CTGACAGGCATTGCTGTGGAACAGGACAAGAACACCCAGGAGGTGTTCGCCCAAGTGAAGCAGATTTA
CAAGACACCTCCAATCAAGGACTTTGGAGGCTTCAACTTCAGCCAGATTCTGCCTGACCCAAGCAAGC
CAAGCAAGAGGTCCTTCATTGAGGACCTGCTGTTCAACAAGGTGACCCTGGCTGATGCTGGCTTCATC
AAGCAATATGGAGACTGTCTGGGAGACATTGCCGCCAGGGACCTGATTTGTGCCCAGAAGTTCAATGG
ACTGACAGTGCTGCCTCCACTGCTGACAGATGAGATGATTGCCCAATACACCTCTGCCCTGCTGGCTG
GCACCATCACCTCTGGCTGGACCTTTGGAGCAGGAGCAGCCCTCCAAATCCCATTTGCTATGCAGATG
GCTTACAGGTTCAATGGCATTGGAGTGACCCAGAATGTGCTCTATGAGAACCAGAAACTGATTGCCAA
CCAGTTCAACTCTGCCATTGGCAAGATTCAGGACTCCCTGTCCAGCACAGCCTCTGCCCTGGGCAAGC
TCCAAAACGTGGTGAACCAGAATGCCCAGGCTCTGAACACCCTGGTGAAGCAACTTTCCAGCAACTTT
GGAGCCATCTCCTCTGTGCTGAATGACATCCTGAGCAGACTGGACAAGGTGGAGGCTGAGGTCCAGAT
TGACAGACTGATTACAGGCAGACTCCAATCCCTCCAAACCTATGTGACCCAACAACTTATCAGGGCTG
CTGAGATTAGGGCATCTGCCAACCTGGCTGCCACCAAGATGAGTGAGTGTGTGCTGGGACAAAGCAAG
AGGGTGGACTTCTGTGGCAAGGGCTACCACCTGATGAGTTTTCCACAGTCTGCCCCTCATGGAGTGGT
GTTCCTGCATGTGACCTATGTGCCTGCCCAGGAGAAGAACTTCACCACAGCCCCTGCCATCTGCCATG
ATGGCAAGGCTCACTTTCCAAGGGAGGGAGTGTTTGTGAGCAATGGCACCCACTGGTTTGTGACCCAG
AGGAACTTCTATGAACCACAGATTATCACCACAGACAACACCTTTGTGTCTGGCAACTGTGATGTGGT
GATTGGCATTGTGAACAACACAGTCTATGACCCACTCCAGCCTGAACTGGACTCCTTCAAGGAGGAAC
TGGACAAATACTTCAAGAACCACACCAGCCCTGATGTGGACCTGGGAGACATCTCTGGCATCAATGCC
TCTGTGGTGAACATCCAGAAGGAGATTGACAGACTGAATGAGGTGGCTAAGAACCTGAATGAGTCCCT
GATTGACCTCCAAGAACTGGGCAAATATGAACAATACATCAAGTGGCCATGGTACATCTGGCTGGGCT
TCATTGCTGGACTGATTGCCATTGTGATGGTGACCATAATGCTGTGTTGTATGACCTCCTGTTGTTCC
TGTCTGAAAGGCTGTTGTTCCTGTGGCTCCTGTTGTTGAggatccgagctcggtaccaagcttaagtt
taaaccgctgatcagcctcgactgtgccttctagttgccagccatctgttgtttgcccctcccccgtg
ccttccttgaccctggaaggtgccactcccactgtcctttcctaataaaatgaggaaattgcatcgca
ttgtctgagtaggtgtcattctattctggggggtggggtggggcaggacagcaagggggaggattggg
aagacaatagcaggcatgctggggatgcggtgggctctatggcttctgaggcggaaagaaccagctgg
ggctctagggggtatccccacgcgccctgtagcggcgcattaagcgcggcgggtgtggtggttacgcg
cagcgtgaccgctacacttgccagcgccctagcgcccgctcctttcgctttcttcccttcctttctcg
ccacgttcgccggctttccccgtcaagctctaaatcgggggctccctttagggttccgatttagtgct
ttacggcacctcgaccccaaaaaacttgattagggtgatggttcacgtagtgggccatcgccctgata
gacggtttttcgccctttgacgttggagtccacgttctttaatagtggactcttgttccaaactggaa
caacactcaaccctatctcggtctattcttttgatttataagggattttgccgatttcggcctattgg
ttaaaaaatgagctgatttaacaaaaatttaacgcgaattaattctgtggaatgtgtgtcagttaggg
tgtggaaagtccccaggctccccagcaggcagaagtatgcaaagcatgcatctcaattagtcagcaac
caggtgtggaaagtccccaggctccccagcaggcagaagtatgcaaagcatgcatctcaattagtcag
caaccatagtcccgcccctaactccgcccatcccgcccctaactccgcccagttccgcccattctccg
ccccatggctgactaattttttttatttatgcagaggccgaggccgcctctgcctctgagctattcca
gaagtagtgaggaggcttttttggaggcctaggcttttgcaaaaagctcccgggagcttgtatatcca
ttttcggatctgatcaagagacaggatgaggatcgtttcgcatgattgaacaagatggattgcacgca
ggttctccggccgcttgggtggagaggctattcggctatgactgggcacaacagacaatcggctgctc
tgatgccgccgtgttccggctgtcagcgcaggggcgcccggttctttttgtcaagaccgacctgtccg
gtgccctgaatgaactgcaggacgaggcagcgcggctatcgtggctggccacgacgggcgttccttgc
gcagctgtgctcgacgttgtcactgaagcgggaagggactggctgctattgggcgaagtgccggggca
ggatctcctgtcatctcaccttgctcctgccgagaaagtatccatcatggctgatgcaatgcggcggc
tgcatacgcttgatccggctacctgcccattcgaccaccaagcgaaacatcgcatcgagcgagcacgt
actcggatggaagccggtcttgtcgatcaggatgatctggacgaagagcatcaggggctcgcgccagc
cgaactgttcgccaggctcaaggcgcgcatgcccgacggcgaggatctcgtcgtgacccatggcgatg
cctgcttgccgaatatcatggtggaaaatggccgcttttctggattcatcgactgtggccggctgggt
gtggcggaccgctatcaggacatagcgttggctacccgtgatattgctgaagagcttggcggcgaatg
ggctgaccgcttcctcgtgctttacggtatcgccgctcccgattcgcagcgcatcgccttctatcgcc
ttcttgacgagttcttctgagcgggactctggggttcgaaatgaccgaccaagcgacgcccaacctgc
catcacgagatttcgattccaccgccgccttctatgaaaggttgggcttcggaatcgttttccgggac
gccggctggatgatcctccagcgcggggatctcatgctggagttcttcgcccaccccaacttgtttat
tgcagcttataatggttacaaataaagcaatagcatcacaaatttcacaaataaagcatttttttcac
tgcattctagttgtggtttgtccaaactcatcaatgtatcttatcatgtctgtataccgtcgacctct
agctagagcttggcgtaatcatggtcatagctgtttcctgtgtgaaattgttatccgctcacaattcc
acacaacatacgagccggaagcataaagtgtaaagcctggggtgcctaatgagtgagctaactcacat
taattgcgttgcgctcactgcccgctttccagtcgggaaacctgtcgtgccagctgcattaatgaatc
ggccaacgcgcggggagaggcggtttgcgtattgggcgctcttccgcttcctcgctcactgactcgct
gcgctcggtcgttcggctgcggcgagcggtatcagctcactcaaaggcggtaatacggttatccacag
aatcaggggataacgcaggaaagaacatgtgagcaaaaggccagcaaaaggccaggaaccgtaaaaag
gccgcgttgctggcgtttttccataggctccgcccccctgacgagcatcacaaaaatcgacgctcaag
tcagaggtggcgaaacccgacaggactataaagataccaggcgtttccccctggaagctccctcgtgc
gctctcctgttccgaccctgccgcttaccggatacctgtccgcctttctcccttcgggaagcgtggcg
ctttctcatagctcacgctgtaggtatctcagttcggtgtaggtcgttcgctccaagctgggctgtgt
gcacgaaccccccgttcagcccgaccgctgcgccttatccggtaactatcgtcttgagtccaacccgg
taagacacgacttatcgccactggcagcagccactggtaacaggattagcagagcgaggtatgtaggc
ggtgctacagagttcttgaagtggtggcctaactacggctacactagaagaacagtatttggtatctg
cgctctgctgaagccagttaccttcggaaaaagagttggtagctcttgatccggcaaacaaaccaccg
ctggtagcggtggtttttttgtttgcaagcagcagattacgcgcagaaaaaaaggatctcaagaagat
cctttgatcttttctacggggtctgacgctcagtggaacgaaaactcacgttaagggattttggtcat
gagattatcaaaaaggatcttcacctagatccttttaaattaaaaatgaagttttaaatcaatctaaa
gtatatatgagtaaacttggtctgacagttaccaatgcttaatcagtgaggcacctatctcagcgatc
tgtctatttcgttcatccatagttgcctgactccccgtcgtgtagataactacgatacgggagggctt
accatctggccccagtgctgcaatgataccgcgagacccacgctcaccggctccagatttatcagcaa
taaaccagccagccggaagggccgagcgcagaagtggtcctgcaactttatccgcctccatccagtct
attaattgttgccgggaagctagagtaagtagttcgccagttaatagtttgcgcaacgttgttgccat
tgctacaggcatcgtggtgtcacgctcgtcgtttggtatggcttcattcagctccggttcccaacgat
caaggcgagttacatgatcccccatgttgtgcaaaaaagcggttagctccttcggtcctccgatcgtt
gtcagaagtaagttggccgcagtgttatcactcatggttatggcagcactgcataattctcttactgt
catgccatccgtaagatgcttttctgtgactggtgagtactcaaccaagtcattctgagaatagtgta
tgcggcgaccgagttgctcttgcccggcgtcaatacgggataataccgcgccacatagcagaacttta
aaagtgctcatcattggaaaacgttcttcggggcgaaaactctcaaggatcttaccgctgttgagatc
cagttcgatgtaacccactcgtgcacccaactgatcttcagcatcttttactttcaccagcgtttctg
ggtgagcaaaaacaggaaggcaaaatgccgcaaaaaagggaataagggcgacacggaaatgttgaata
ctcatactcttcctttttcaatattattgaagcatttatcagggttattgtctcatgagcggatacat
atttgaatgtatttagaaaaataaacaaataggggttccgcgcacatttccccgaaaagtgccacctg
acgtc
SARS-COV-2 Delta Variant del 19 Spike
(SEQ ID NO: 47)
MFVFLVLLPLVSSQCVNLRTRTQLPPAYTNSFTRGVYYPDKVFRSSVLHSTQDLFLPFFSNVTWFHAI
HVSGTNGTKRFDNPVLPFNDGVYFASTEKSNIIRGWIFGTTLDSKTQSLLIVNNATNVVIKVCEFQFC
NDPFLDVYYHKNNKSWMESGVYSSANNCTFEYVSQPFLMDLEGKQGNEKNLREFVEKNIDGYFKIYSK
HTPINLVRDLPQGFSALEPLVDLPIGINITRFQTLLALHRSYLTPGDSSSGWTAGAAAYYVGYLQPRT
FLLKYNENGTITDAVDCALDPLSETKCTLKSFTVEKGIYQTSNERVQPTESIVRFPNITNLCPFGEVE
NATRFASVYAWNRKRISNCVADYSVLYNSASFSTFKCYGVSPTKLNDLCFTNVYADSEVIRGDEVRQI
APGQTGKIADYNYKLPDDFTGCVIAWNSNNLDSKVGGNYNYRYRLFRKSNLKPFERDISTEIYQAGSK
PCNGVEGENCYFPLQSYGFQPTNGVGYQPYRVVVLSFELLHAPATVCGPKKSTNLVKNKCVNFNENGL
TGTGVLTESNKKELPFQQFGRDIADTTDAVRDPQTLEILDITPCSFGGVSVITPGTNTSNQVAVLYQG
VNCTEVPVAIHADQLTPTWRVYSTGSNVFQTRAGCLIGAEHVNNSYECDIPIGAGICASYQTQTNSRR
RARSVASQSIIAYTMSLGAENSVAYSNNSIAIPTNFTISVTTEILPVSMTKTSVDCTMYICGDSTECS
NLLLQYGSFCTQLNRALTGIAVEQDKNTQEVFAQVKQIYKTPPIKDFGGENESQILPDPSKPSKRSFI
EDLLENKVTLADAGFIKQYGDCLGDIAARDLICAQKENGLTVLPPLLTDEMIAQYTSALLAGTITSGW
TFGAGAALQIPFAMQMAYRENGIGVTQNVLYENQKLIANQFNSAIGKIQDSLSSTASALGKLONVVNQ
NAQALNTLVKQLSSNFGAISSVLNDILSRLDKVEAEVQIDRLITGRLQSLQTYVTQQLIRAAEIRASA
NLAATKMSECVLGQSKRVDFCGKGYHLMSFPQSAPHGVVFLHVTYVPAQEKNFTTAPAICHDGKAHFP
REGVFVSNGTHWFVTQRNFYEPQIITTDNTFVSGNCDVVIGIVNNTVYDPLQPELDSFKEELDKYFKN
HTSPDVDLGDISGINASVVNIQKEIDRLNEVAKNLNESLIDLQELGKYEQYIKWPWYIWLGFIAGLIA
IVMVTIMLCCMTSCCSCLKGCCSCGSCC*
MERS-COV Spike DeltaC-16
(SEQ ID NO: 48)
MIHSVFLLMFLLTPTESYVDVGPDSVKSACIEVDIQQTFFDKTWPRPIDVSKADGIIYPQGRTYSNIT
ITYQGLFPYQGDHGDMYVYSAGHATGTTPQKLFVANYSQDVKQFANGFVVRIGAAANSTGTVIISPST
SATIRKIYPAFMLGSSVGNFSDGKMGRFFNHTLVLLPDGCGTLLRAFYCILEPRSGNHCPAGNSYTSE
ATYHTPATDCSDGNYNRNASLNSFKEYFNLRNCTFMYTYNITEDEILEWFGITQTAQGVHLESSRYVD
LYGGNMFQFATLPVYDTIKYYSIIPHSIRSIQSDRKAWAAFYVYKLQPLTELLDESVDGYIRRAIDCG
FNDLSQLHCSYESFDVESGVYSVSSFEAKPSGSVVEQAEGVECDESPLLSGTPPQVYNEKRLVETNCN
YNLTKLLSLESVNDFTCSQISPAAIASNCYSSLILDYFSYPLSMKSDLSVSSAGPISQFNYKQSESNP
TCLILATVPHNLTTITKPLKYSYINKCSRLLSDDRTEVPQLVNANQYSPCVSIVPSTVWEDGDYYRKQ
LSPLEGGGWLVASGSTVAMTEQLQMGFGITVQYGTDTNSVCPKLEFANDTKIASQLGNCVEYSLYGVS
GRGVFQNCTAVGVRQQRFVYDAYQNLVGYYSDDGNYYCLRACVSVPVSVIYDKETKTHATLFGSVACE
HISSTMSQYSRSTRSMLKRRDSTYGPLQTPVGCVLGLVNSSLFVEDCKLPLGQSLCALPDTPSTLTPR
SVRSVPGEMRLASIAFNHPIQVDQLNSSYFKLSIPTNFSFGVTQEYIQTTIQKVTVDCKQYVCNGFQK
CEQLLREYGQFCSKINQALHGANLRQDDSVRNLFASVKSSQSSPIIPGFGGDENLTLLEPVSISTGSR
SARSAIEDLLEDKVTIADPGYMQGYDDCMQQGPASARDLICAQYVAGYKVLPPLMDVNMEAAYTSSLL
GSIAGVGWTAGLSSFAAIPFAQSIFYRLNGVGITQQVLSENQKLIANKENQALGAMQTGFTTTNEAFQ
KVQDAVNNNAQALSKLASELSNTFGAISASIGDIIQRLDVLEQDAQIDRLINGRLTTLNAFVAQQLVR
SESAALSAQLAKDKVNECVKAQSKRSGFCGQGTHIVSFVVNAPNGLYFMHVGYYPSNHIEVVSAYGLC
DAANPTNCIAPVNGYFIKTNNTRIVDEWSYTGSSFYAPEPITSLNTKYVAPQVTYQNISTNLPPPLLG
NSTGIDFQDELDEFFKNVSTSIPNFGSLTQINTTLLDLTYEMLSLQQVVKALNESYIDLKELGNYTYY
NKWPWYIWLGFIAGLVALALCVFFILCCTGCGTNCMGKLKCNRCC*
SARS-COV Spike Delta C-19
(SEQ ID NO: 49)
MFIFLLELTLTSGSDLDRCTTFDDVQAPNYTQHTSSMRGVYYPDEIFRSDTLYLTQDLFLPFYSNVTG
FHTINHTEDNPVIPFKDGIYFAATEKSNVVRGWVFGSTMNNKSQSVIIINNSTNVVIRACNFELCDNP
FFAVSKPMGTQTHTMIFDNAFNCTFEYISDAFSLDVSEKSGNFKHLREFVFKNKDGFLYVYKGYQPID
VVRDLPSGFNTLKPIFKLPLGINITNFRAILTAFSPAQDTWGTSAAAYFVGYLKPTTEMLKYDENGTI
TDAVDCSQNPLAELKCSVKSFEIDKGIYQTSNFRVVPSGDVVRFPNITNLCPFGEVENATKFPSVYAW
ERKKISNCVADYSVLYNSTFFSTFKCYGVSATKLNDLCFSNVYADSFVVKGDDVRQIAPGQTGVIADY
NYKLPDDEMGCVLAWNTRNIDATSTGNYNYKYRYLRHGKLRPFERDISNVPFSPDGKPCTPPALNCYW
PLNDYGFYTTTGIGYQPYRVVVLSFELLNAPATVCGPKLSTDLIKNQCVNFNFNGLTGTGVLTPSSKR
FQPFQQFGRDVSDFTDSVRDPKTSEILDISPCSFGGVSVITPGTNASSEVAVLYQDVNCTDVSTAIHA
DQLTPAWRIYSTGNNVFQTQAGCLIGAEHVDTSYECDIPIGAGICASYHTVSLLRSTSQKSIVAYTMS
LGADSSIAYSNNTIAIPTNFSISITTEVMPVSMAKTSVDCNMYICGDSTECANLLLQYGSFCTQLNRA
LSGIAAEQDRNTREVFAQVKQMYKTPTLKYFGGFNFSQILPDPLKPTKRSFIEDLLENKVTLADAGEM
KQYGECLGDINARDLICAQKENGLTVLPPLLTDDMIAAYTAALVSGTATAGWTFGAGAALQIPFAMQM
AYRENGIGVTQNVLYENQKQIANQFNKAISQIQESLTTTSTALGKLQDVVNQNAQALNTLVKQLSSNF
GAISSVLNDILSRLDKVEAEVQIDRLITGRLQSLQTYVTQQLIRAAEIRASANLAATKMSECVLGQSK
RVDFCGKGYHLMSFPQAAPHGVVFLHVTYVPSQERNFTTAPAICHEGKAYFPREGVFVENGTSWFITQ
RNFFSPQIITTDNTFVSGNCDVVIGIINNTVYDPLQPELDSFKEELDKYFKNHTSPDVDLGDISGINA
SVVNIQKEIDRLNEVAKNLNESLIDLQELGKYEQYIKWPWYVWLGFIAGLIAIVMVTILLCCMTSCCS
CLKGACSCGSCC*
SARS-COV-2 Spike Hexapro
(SEQ ID NO: 50)
MFVFLVLLPLVSSQCVNLRTRTQLPPAYTNSFTRGVYYPDKVFRSSVLHSTQDLFLPFFSNVTWFHAI
HVSGTNGTKRFDNPVLPENDGVYFASTEKSNIIRGWIFGTTLDSKTQSLLIVNNATNVVIKVCEFQFC
NDPFLDVYYHKNNKSWMESGVYSSANNCTFEYVSQPFLMDLEGKQGNFKNLREFVFKNIDGYFKIYSK
HTPINLVRDLPQGFSALEPLVDLPIGINITRFQTLLALHRSYLTPGDSSSGWTAGAAAYYVGYLQPRT
FLLKYNENGTITDAVDCALDPLSETKCTLKSFTVEKGIYQTSNERVQPTESIVRFPNITNLCPFGEVE
NATRFASVYAWNRKRISNCVADYSVLYNSASFSTFKCYGVSPTKLNDLCFTNVYADSEVIRGDEVRQI
APGQTGKIADYNYKLPDDFTGCVIAWNSNNLDSKVGGNYNYRYRLFRKSNLKPFERDISTEIYQAGSK
PCNGVEGENCYFPLQSYGFQPTNGVGYQPYRVVVLSFELLHAPATVCGPKKSTNLVKNKCVNENENGL
TGTGVLTESNKKELPFQQFGRDIADTTDAVRDPQTLEILDITPCSFGGVSVITPGTNTSNQVAVLYQG
VNCTEVPVAIHADQLTPTWRVYSTGSNVFQTRAGCLIGAEHVNNSYECDIPIGAGICASYQTQTNSRG
SASSVASQSIIAYTMSLGAENSVAYSNNSIAIPTNFTISVTTEILPVSMTKTSVDCTMYICGDSTECS
NLLLQYGSFCTQLNRALTGIAVEQDKNTQEVFAQVKQIYKTPPIKDFGGENFSQILPDPSKPSKRSPI
EDLLENKVTLADAGFIKQYGDCLGDIAARDLICAQKENGLTVLPPLLTDEMIAQYTSALLAGTITSGW
TFGAGPALQIPFPMQMAYRENGIGVTQNVLYENQKLIANQFNSAIGKIQDSLSSTPSALGKLONVVNQ
NAQALNTLVKQLSSNFGAISSVLNDILSRLDPPEAEVQIDRLITGRLQSLQTYVTQQLIRAAEIRASA
NLAATKMSECVLGQSKRVDFCGKGYHLMSFPQSAPHGVVFLHVTYVPAQEKNFTTAPAICHDGKAHFP
REGVFVSNGTHWFVTQRNFYEPQIITTDNTFVSGNCDVVIGIVNNTVYDPLQPELDSFKEELDKYFKN
HTSPDVDLGDISGINASVVNIQKEIDRLNEVAKNLNESLIDLQELGKYEQYIKWPWYIWLGFIAGLIA
IVMVTIMLCCMTSCCSCLKGCCSCGSCCKEDEDDSEPVLKGVKLHYT*
MERS-COV Spike Hexapro
(SEQ ID NO: 51)
MIHSVFLLMFLLTPTESYVDVGPDSVKSACIEVDIQQTFFDKTWPRPIDVSKADGIIYPQGRTYSNIT
ITYQGLFPYQGDHGDMYVYSAGHATGTTPQKLFVANYSQDVKQFANGFVVRIGAAANSTGTVIISPST
SATIRKIYPAFMLGSSVGNFSDGKMGRFFNHTLVLLPDGCGTLLRAFYCILEPRSGNHCPAGNSYTSE
ATYHTPATDCSDGNYNRNASLNSFKEYFNLRNCTFMYTYNITEDEILEWFGITQTAQGVHLESSRYVD
LYGGNMFQFATLPVYDTIKYYSIIPHSIRSIQSDRKAWAAFYVYKLQPLTELLDESVDGYIRRAIDCG
FNDLSQLHCSYESFDVESGVYSVSSFEAKPSGSVVEQAEGVECDESPLLSGTPPQVYNFKRLVETNCN
YNLTKLLSLFSVNDFTCSQISPAAIASNCYSSLILDYFSYPLSMKSDLSVSSAGPISQFNYKQSESNP
TCLILATVPHNLTTITKPLKYSYINKCSRLLSDDRTEVPQLVNANQYSPCVSIVPSTVWEDGDYYRKQ
LSPLEGGGWLVASGSTVAMTEQLQMGFGITVQYGTDTNSVCPKLEFANDTKIASQLGNCVEYSLYGVS
GRGVFQNCTAVGVRQQREVYDAYQNLVGYYSDDGNYYCLRACVSVPVSVIYDKETKTHATLEGSVACE
HISSTMSQYSRSTRSMLKRRDSTYGPLQTPVGCVLGLVNSSLFVEDCKLPLGQSLCALPDTPSTLTPR
SVRSVPGEMRLASIAFNHPIQVDQLNSSYFKLSIPTNFSFGVTQEYIQTTIQKVTVDCKQYVCNGFQK
CEQLLREYGQFCSKINQALHGANLRQDDSVRNLFASVKSSQSSPIIPGEGGDENLTLLE
SARS-COV Spike Hexapro
(SEQ ID NO: 52)
MFIFLLFLTLTSGSDLDRCTTFDDVQAPNYTQHTSSMRGVYYPDEIFRSDTLYLTQDLFLPFYSNVTG
FHTINHTEDNPVIPFKDGIYFAATEKSNVVRGWVFGSTMNNKSQSVIIINNSTNVVIRACNFELCDNP
FFAVSKPMGTQTHTMIFDNAENCTFEYISDAFSLDVSEKSGNFKHLREFVEKNKDGFLYVYKGYQPID
VVRDLPSGFNTLKPIFKLPLGINITNFRAILTAFSPAQDTWGTSAAAYFVGYLKPTTFMLKYDENGTI
TDAVDCSQNPLAELKCSVKSFEIDKGIYQTSNFRVVPSGDVVRFPNITNLCPFGEVENATKEPSVYAW
ERKKISNCVADYSVLYNSTFFSTFKCYGVSATKLNDLCFSNVYADSFVVKGDDVRQIAPGQTGVIADY
NYKLPDDEMGCVLAWNTRNIDATSTGNYNYKYRYLRHGKLRPFERDISNVPFSPDGKPCTPPALNCYW
PLNDYGFYTTTGIGYQPYRVVVLSFELLNAPATVCGPKLSTDLIKNQCVNFNFNGLTGTGVLTPSSKR
FQPFQQFGRDVSDFTDSVRDPKTSEILDISPCSFGGVSVITPGTNASSEVAVLYQDVNCTDVSTAIHA
DQLTPAWRIYSTGNNVFQTQAGCLIGAEHVDTSYECDIPIGAGICASYHTVSLLRSTSQKSIVAYTMS
LGADSSIAYSNNTIAIPTNFSISITTEVMPVSMAKTSVDCNMYICGDSTECANLLLQYGSFCTQLNRA
LSGIAAEQDRNTREVFAQVKQMYKTPTLKYFGGFNFSQILPDPLKPTKRSPIEDLLENKVTLADAGEM
KQYGECLGDINARDLICAQKENGLTVLPPLLTDDMIAAYTAALVSGTATAGWTFGAGPALQIPFPMQM
AYRENGIGVTQNVLYENQKQIANQFNKAISQIQESLTTTPTALGKLQDVVNQNAQALNTLVKQLSSNF
GAISSVLNDILSRLDPPEAEVQIDRLITGRLQSLQTYVTQQLIRAAEIRASANLAATKMSECVLGQSK
RVDFCGKGYHLMSFPQAAPHGVVFLHVTYVPSQERNFTTAPAICHEGKAYFPREGVEVENGTSWFITQ
RNFFSPQIITTDNTFVSGNCDVVIGIINNTVYDPLQPELDSFKEELDKYFKNHTSPDVDLGDISGINA
SVVNIQKEIDRLNEVAKNLNESLIDLQELGKYEQYIKWPWYVWLGFIAGLIAIVMVTILLCCMTSCCS
CLKGACSCGSCCKFDEDDSEPVLKGVKLHYT*
SARS-COV-2 Spike Hexapro (pVP31b)
(SEQ ID NO: 53)
MFVFLVLLPLVSSQCVNLTTRTQLPPAYTNSFTRGVYYPDKVFRSSVLHSTQDLFLPFFSNVTWFHAI
HVSGTNGTKRFDNPVLPENDGVYFASTEKSNIIRGWIFGTTLDSKTQSLLIVNNATNVVIKVCEFQFC
NDPFLGVYYHKNNKSWMESEFRVYSSANNCTFEYVSQPFLMDLEGKQGNEKNLREFVEKNIDGYFKIY
SKHTPINLVRDLPQGFSALEPLVDLPIGINITRFQTLLALHRSYLTPGDSSSGWTAGAAAYYVGYLQP
RTFLLKYNENGTITDAVDCALDPLSETKCTLKSFTVEKGIYQTSNERVQPTESIVRFPNITNLCPFGE
VENATRFASVYAWNRKRISNCVADYSVLYNSASFSTFKCYGVSPTKLNDLCFTNVYADSFVIRGDEVR
QIAPGQTGKIADYNYKLPDDFTGCVIAWNSNNLDSKVGGNYNYLYRLFRKSNLKPFERDISTEIYQAG
STPCNGVEGENCYFPLQSYGFQPTNGVGYQPYRVVVLSFELLHAPATVCGPKKSTNLVKNKCVNENEN
GLTGTGVLTESNKKELPFQQFGRDIADTTDAVRDPQTLEILDITPCSFGGVSVITPGTNTSNQVAVLY
QDVNCTEVPVAIHADQLTPTWRVYSTGSNVFQTRAGCLIGAEHVNNSYECDIPIGAGICASYQTQTNS
PGSASSVASQSIIAYTMSLGAENSVAYSNNSIAIPTNFTISVTTEILPVSMTKTSVDCTMYICGDSTE
CSNLLLQYGSFCTQLNRALTGIAVEQDKNTQEVFAQVKQIYKTPPIKDEGGENFSQILPDPSKPSKRS
PIEDLLFNKVTLADAGFIKQYGDCLGDIAARDLICAQKENGLTVLPPLLTDEMIAQYTSALLAGTITS
GWTFGAGPALQIPFPMQMAYRENGIGVTQNVLYENQKLIANQFNSAIGKIQDSLSSTPSALGKLQDVV
NQNAQALNTLVKQLSSNFGAISSVLNDILSRLDPPEAEVQIDRLITGRLQSLQTYVTQQLIRAAEIRA
SANLAATKMSECVLGQSKRVDFCGKGYHLMSFPQSAPHGVVFLHVTYVPAQEKNFTTAPAICHDGKAH
FPREGVFVSNGTHWFVTQRNFYEPQIITTDNTFVSGNCDVVIGIVNNTVYDPLQPELDSFKEELDKYF
KNHTSPDVDLGDISGINASVVNIQKEIDRLNEVAKNLNESLIDLQELGKYEQYIKWPWYIWLGFIAGL
IAIVMVTIMLCCMTSCCSCLKGCCSCGSCCKEDEDDSEPVLKGVKLHYT*
SARS-COV-2 Spike Delta C-19 (pVP24)
(SEQ ID NO: 54)
MFVFLVLLPLVSSQCVNLTTRTQLPPAYTNSFTRGVYYPDKVFRSSVLHSTQDLFLPFFSNVTWFHAI
HVSGTNGTKRFDNPVLPENDGVYFASTEKSNIIRGWIFGTTLDSKTQSLLIVNNATNVVIKVCEFQFC
NDPFLGVYYHKNNKSWMESEFRVYSSANNCTFEYVSQPFLMDLEGKQGNEKNLREFVEKNIDGYFKIY
SKHTPINLVRDLPQGESALEPLVDLPIGINITRFQTLLALHRSYLTPGDSSSGWTAGAAAYYVGYLQP
RTFLLKYNENGTITDAVDCALDPLSETKCTLKSFTVEKGIYQTSNERVQPTESIVRFPNITNLCPFGE
VENATRFASVYAWNRKRISNCVADYSVLYNSASFSTFKCYGVSPTKLNDLCFTNVYADSFVIRGDEVR
QIAPGQTGKIADYNYKLPDDFTGCVIAWNSNNLDSKVGGNYNYLYRLERKSNLKPFERDISTEIYQAG
STPCNGVEGENCYFPLQSYGFQPTNGVGYQPYRVVVLSFELLHAPATVCGPKKSTNLVKNKCVNENEN
GLTGTGVLTESNKKELPFQQFGRDIADTTDAVRDPQTLEILDITPCSFGGVSVITPGTNTSNQVAVLY
QDVNCTEVPVAIHADQLTPTWRVYSTGSNVFQTRAGCLIGAEHVNNSYECDIPIGAGICASYQTQTNS
PRRARSVASQSIIAYTMSLGAENSVAYSNNSIAIPTNFTISVTTEILPVSMTKTSVDCTMYICGDSTE
CSNLLLQYGSFCTQLNRALTGIAVEQDKNTQEVFAQVKQIYKTPPIKDFGGENFSQILPDPSKPSKRS
FIEDLLENKVTLADAGFIKQYGDCLGDIAARDLICAQKENGLTVLPPLLTDEMIAQYTSALLAGTITS
GWTFGAGAALQIPFAMQMAYRENGIGVTQNVLYENQKLIANQFNSAIGKIQDSLSSTASALGKLQDVV
NQNAQALNTLVKQLSSNFGAISSVLNDILSRLDKVEAEVQIDRLITGRLQSLQTYVTQQLIRAAEIRA
SANLAATKMSECVLGQSKRVDFCGKGYHLMSFPQSAPHGVVFLHVTYVPAQEKNFTTAPAICHDGKAH
FPREGVFVSNGTHWFVTQRNFYEPQIITTDNTFVSGNCDVVIGIVNNTVYDPLQPELDSFKEELDKYF
KNHTSPDVDLGDISGINASVVNIQKEIDRLNEVAKNLNESLIDLQELGKYEQYIKWPWYIWLGFIAGL
IAIVMVTIMLCCMTSCCSCLKGCCSCGSCC*

### Results

### Design and Biophysical Characterization of Triplex Coronavirus Vaccine Against SARS-CoV-2, SARS-CoV and MERS-CoV

[0408] Vaccine candidate constructs encoding full-length spike mRNA of SARS-CoV-2 (labeled as SARS2 for short) Delta variant (Delta), SARS-CoV (SARS) and MERS-CoV (MERS) were first designed (FIGS. 38A-38B; FIG. 43A). Each construct contains a 5′untranslated region (UTR), an open reading frame (ORF), a 3′UTR and a polyA signal. The ORFs encode full-length spikes of defined species (SARS2, SARS and MERS), in which 6 additional proline mutations (HexaPro) were introduced in the S2 domain of the respective species (FIGS. 38A-38B), based on the homologous amino acid positions of SARS-CoV-2, to improve expression and stable prefusion state of spikes (Hsieh et al., 2020). The Delta construct ORF encodes the spike of SARS-CoV-2 Delta variant, which has nine mutations (T19R, 156del, 157del, R158G, L452R, T478K, D614G, P681R, and Q1071H) as compared to the original “wildtype” virus (WT, WA-1 or WA1) virus (FIGS. 1A-1B). We tested each of these mRNA constructs and showed that they all successfully generate functional protein upon introduction into mammalian cells, as evident by surface binding to the cognate human receptors, hACE2 for SARS-CoV and SARS-CoV-2, and hDPP4 for MERS, respectively (FIGS. 43B-43C).

[0409] To multiplex these constructs, an equal-mass mixture of spike mRNA of Delta, SARS and MERS, was prepared which were then encapsulated by lipid nanoparticles on a microfluidics instrument, to generate a triplex LNP-mRNA formulation of vaccine candidate (termed as Triplex or MixCoV, interchangeable aliases) (FIG. 38C). A Delta singlet LNP-mRNA for testing in parallel was also prepared. The size and homogeneity of assembled LNPs were evaluated by dynamic light scatter and transmission electron microscope (FIGS. 38D-E). The Delta LNP-mRNA and Triplex LNP-mRNA showed monodispersed size distribution with averaged radius of 70+3.8 nm and 71+3.6 nm, and polydispersity indices of 0.160 and 0.157, respectively. To evaluate the immunogenicity of Delta and Triplex LNP-mRNA vaccines, C57BL/6Ncr (B6) mice were immunized intramuscularly with two doses (prime and boost) of 1 μg Delta LNP-mRNA, 1 μg or 3 μg (total mRNA mass) Triplex LNP-mRNA, three weeks apart (FIG. 38F). The peripheral blood mononuclear cells (PBMCs) and plasma were collected two weeks post boost. The mice humoral response including binding and neutralizing antibody response against spike antigens were examined by ELISA and neutralization assays using collected plasma samples. Single cell RNA-sequencing (scRNA-seq) was performed to profile the systemic immune repertoires and their respective transcriptomics in vaccinated animals (FIG. 38F).

### Immune Responses to Triplex Coronavirus LNP-mRNA Vaccination Against SARS2, SARS and MERS

[0410] Compared to the PBS control group, the 1 μg Delta LNP-mRNA, 1 μg and 3 μg Triplex LNP-mRNA all elicited potent antibody response, as seen in the high post-boost binding antibody titers against both RBD and ECD of Delta, WT and SARS spikes (FIGS. 1G-1H). Among the three vaccination groups, only 3 μg Triplex LNP-mRNA significantly boosted mice immunity to MERS antigens (FIGS. 38G-38H and FIG. 43). As the Delta and Triplex vaccines used the Delta variant as spike antigen, their responses to Delta ELISA antigen were found slightly higher than WT antigen (FIG. 38G and FIG. 43). Despite of the lack of SARS spike antigen in the vaccine, the Delta LNP-mRNA induced antibodies that cross-react with SARS spike, but not MERS spike (FIG. 38G and FIG. 43), consistent with the respective degree of homology between these species (FIG. 43A). The titers are at similarly high level between the 1 μg and 3 μg Triplex groups for SARS and SARS2 spikes (FIG. 38G), while there is a trend of dose-dependent increase although statistically insignificant (FIG. 43). Compared to those of MixCoV 1 μg or 3 μg groups, SARS-binding antibody titer in 1 μg Delta LNP-mRNA group was significantly lower. A dose-dependent increase trend of antibody titers was observed for MERS spike in the two triplex vaccination groups (FIG. 38G). Within the Triplex groups, it is worth noting that antibody titer against MERS was 10-20 fold lower than that against SARS-CoV or SARS-CoV-2. Considering Delta spike mRNA at the same dose, mice in the 1 μg Delta and 3 μg Triplex (that also contains 1 μg Delta mRNA) groups showed similar titers of antibodies against SARS2 WT and Delta spikes, although an insignificant trend of lower titers was observed in the 3 μg Triplex mice (FIG. 38G and FIG. 43). Both ECD and RBD ELISA antigen panels showed highly correlated results among four spike types used (FIG. 381). In addition, a subset of animals showed relatively higher titer to ECD than RBD (FIG. 38I, off-the-diagonal data points), potentially due to the additional antibody reactivity outside RBD in those animals.

[0411] Subsequent studies then went on to examine the neutralizing antibody response in the pseudo-virus assay. All three Delta and Triplex-CoV LNP-mRNA vaccines induced marked increase in neutralizing antibodies against SARS2 WT/WA-1, Delta and SARS pseudoviruses (FIGS. 39A-B), which mimicked the overall titer landscape of binding antibodies in ELISA. All three LNP-mRNA groups (1 μg Delta, 1 μg and 3 μg Triplex-CoV) elicited potent neutralization activity against SARS2 Delta in the plasma of the vaccinated animals (FIGS. 39A-39B). In addition, both Triplex-CoV LNP-mRNA groups (1 μg and 3 μg Triplex-CoV) elicited potent neutralization activity against SARS in the plasma samples of the vaccinated animals (FIGS. 39A-39B). Despite the lack of SARS mRNA, the Delta alone group of LNP-mRNA also elicited substantial level of anti-SARS neutralization antibody response in a fraction of animals (4/9 above background) with high variation, although significantly lower than those of the Triplex-CoV groups (FIGS. 39A-39B), again potentially due to the similarity between the two species (FIG. 43A). The significantly higher antibody titer against SARS and higher robustness highlighted superior SARS protection efficacy of Triplex-CoV vaccine than Delta vaccine alone against SARS. Moderate neutralization activity against MERS was observed at this dosing scheme, with PBS group showing relatively high background level of neutralization (FIGS. 39A-B). Similar to ELISA, the neutralization activities are at similarly high level between the 1 μg and 3 μg Triplex-CoV groups for SARS and SARS2 spikes (FIGS. 39A-39B), while there is a trend of dose-dependent increase although statistically insignificant. We validated the neutralization against authentic virus of SARS-CoV-2 in a Biosafety Level 3 (BL3) setting, where the plasma samples from all three LNP-mRNA groups (1 μg Delta, 1 μg and 3 μg Triplex-CoV) showed significant neutralization activity (FIG. 39C). Similar to the observations in BL2 pseudovirus assay, the Triplex vaccination at both doses showed a lower level of neutralization against SARS2 as compared to Delta vaccination alone (FIG. 39C). Overall, antibody binding against ECD (ELISA) significantly correlated with neutralization activities for all groups or all mice, among spikes and pseudoviruses tested (FIG. 39D). Consistent with various previous reports, neutralization activity against authentic virus (BL3) significantly correlated with neutralization activities against pseudovirus (BL2), and correlated with binding antibody titers by ELISA (FIG. 39E).

### Immune Responses to Duplex Coronavirus LNP-mRNA Vaccination Centering on MERS

[0412] As the levels of Triplex-CoV-induced MERS binding and neutralizing antibodies were relatively lower than those of SARS and SARS2 in the Triplex-CoV groups (FIGS. 38 and 39), we sought to test single and duplex vaccination schemes for MERS LNP-mRNA (FIG. 40A). A proline mutation engineered prefusion MERS-CoV spike antigen has been previously generated and purified, which provided the basis for a MERS mRNA vaccine in clinical development. To test how the MERS HexaPro spike LNP-mRNA can work in combination with SARS2 Delta or SARS LNP-mRNA as duplex vaccines, we designed a duplex vaccine experiment for MERS LNP-mRNA. In the single vaccine scheme, we used the MERS LNP-mRNA alone (MERS Singlet). In the Duplex vaccine schemes, we mixed the MERS plus SARS, or MERS plus SARS2 Delta mRNAs, for the formulation of LNP-mRNAs (MERS Duplexes).

[0413] Mice vaccinated with 3 μg MERS LNP-mRNA Singlet elicited high titers of MERS binding antibodies with little or no cross reactivity to WT, Delta or SARS spikes (FIGS. 40B-40C, FIG. 43E), suggesting that the MERS LNP-mRNA, when used alone at high dose, has sufficient immunogenicity. Combined with an equal mass of MERS LNP-mRNA, Delta or SARS LNP-mRNA, the two MERS Duplexes also exhibited strong binding antibody titers against cognate antigens (Delta and SARS spike respectively, plus MERS spike) (FIGS. 40B-40C, FIG. 43E).

[0414] Meanwhile they also showed cross-reactive response to counterpart spike (For example, MERS+SARS2 Delta against SARS spike, or vice versa) at a lower level than the cognate response (FIGS. 40B-40C, FIG. 43E). Similar with the Triplex experiment, the ELISA ECD activity highly correlated with RBD (FIG. 40D).

[0415] Subsequent studies again tested the neutralization activities using the same pseudovirus assays. Mice vaccinated with 3 μg MERS LNP-mRNA Singlet elicited potent MERS neutralizing antibody response with little or no cross reactivity to WT, Delta or SARS spikes (FIGS. 40E-40F), suggesting that the antibodies induced by MERS vaccination alone does not cross-react with SARS or SARS2. Both MERS Duplexes also exhibited strong neutralization activities against MERS, as well as cognate species (MERS+SARS2-Delta for SARS2; and MERS+SARS for SARS) (FIGS. 40E-40F). Interestingly, although the MERS +SARS LNP-mRNA elicited binding antibodies that cross reacted with both WT and Delta spike antigens (FIG. 40B), the induced cross-reactive antibodies only significantly neutralized the WT but not Delta pseudovirus (FIG. 40F). Consistent with prior Triplex-CoV experiment, the ELISA ECD panel correlated well with RBD panel results (FIG. 40G) and tend to have higher titers than RBD panel. Overall, such neutralization activities also significantly correlated with antibody binding against ECD (ELISA) for all groups or all mice, among the spike antigens and pseudoviruses tested (FIG. 40G).

### Single Cell Immune Repertoire Mapping of Multiplexed LNP-mRNA Vaccinated Animals

[0416] In order to gain insights on the global composition and transcriptional landscape of the immune cells, single cell RNA-seq (scRNA-seq, scGEX) was performed for immune-transcriptomics on the PBMC samples of Delta and Triplex LNP-mRNA vaccinated animals. The use of PBMC samples allows to collect immune cell samples without sacrificing mice so that it is possible to monitor live animals' antibody response over time. As visualized in an overall Uniform Manifold Approximation and Projection (UMAP), from a total of 12 animals from 4 vaccination groups (Delta 1 μg, Triplex-CoV 1 μg and 3 μg dose groups), plus a placebo control group (PBS), we sequenced the transcriptomes of a total of 91,526 single cells, which were visualized in reduced dimensional space by UMAP and clustered to identify cell population structure (FIGS. 41A-B). Using the expression of a set of canonical cell type specific markers, we identified 21 cell clusters as distinct immune cell populations (FIG. 41A; FIGS. 44A-44D). In this dataset, the identified cell clusters include various subsets of B lymphocytes (naïve B cell, activated B cell, unswitched memory B cell, switched memory B cell, pre-plasmablast, plasmablast and plasma cell); T lymphocytes of various subsets (naïve CD8 T cell, CD8 T effector, CD8 central memory T cell (Tcm), CD8 effector memory T cell (Tem), naïve CD4 T cell, Th1 type CD4 T cell, Th2 type CD4 T cell, regulatory T cell (Treg)); dendritic cells (DCs) of various subsets (pDC, cDC1, cDC2); as well as other immune cells (natural killer (NK) cell, macrophage and monocytes) (FIG. 41A). These immune cell populations have distinct gene expression signatures that clearly defined each population against others (FIG. 41C), for example, distinct expression (in terms of both mean expression level and percentage in cluster) of Cd19+H2-Aa+Ighd+Fcer2a+Cd27−defines activated B cells; Cd9+Sdc1+Cd19−Pax5−lo defines plasma cells (FIG. 41C; FIGS. 44A-B). Similarly, for T cell subset examples, Cd3d+Cd4+Tbx21+Gzmb+marks Th1 CD4 T cells; Cd3d+Cd4+Foxp3+Il2ra+marks Tregs; Cd3d+Cd8b1+Ccr7+Cd44−Tcf7+defines naïve CD8 T cells; Cd3d+Cd8b1+Tcf7−Cd44+Ccr7− defines CD8 effector T cells; Itgam+Itgax+Cd24a−Sirpa+defines cDC2 cells; Itgam−Itgax+Bst2+Siglech+defines pDC; Ncr1 defines NK cells; and Itgam+Csflr+Cd14+ defines monocytes (FIG. 41C; FIGS. 44A-B).

[0417] Studies then quantified the fractions of each cell type in each sample, to reveal a full picture of immune cell compositions in all vaccination groups profiled (FIGS. 41D-E). With these quantitative fractions, we then compared the systemic immune cell compositions between placebo and vaccinated animals (FIG. 41D). While most of the clusters did not show significant difference in a gross cell population level, three populations (activated B cells, unswitched memory B cells and NK cells) showed significant differences between groups (FIGS. 41D-41E). Interestingly, Triplex-CoV/MixCoV at both high and low doses of vaccination showed significantly increased level of activated B cell populations compared to both PBS and to Delta groups (FIGS. 41D-41E). Both activated and memory B cell populations have been previously implicated for their important roles in SARS-CoV-2 immunity.

### Transcriptomic Signatures of B and T Cell Populations of Triplex LNP-mRNA Vaccinated Animals

[0418] To examine the transcriptomic changes in the immune cell sub-populations upon vaccination, subsequent studies then performed differential expression (DE) analysis in the matched sub-populations between PBS and the several LNP-mRNA groups. We focused on the major adaptive immune cell populations, i.e. the pan activated B cell population (including all identified activated B cell subsets, merged as “B cell”), pan activated CD4 T cell population (all identified activated CD4 T cell subsets, “CD4 T cell”) and pan activated CD8 T cell population (all identified activated CD8 T cell subsets, “CD8 T cell”). Vaccination caused substantial transcriptome changes in the host animals' B cells, CD4 T cells and CD8 T cells, as evidenced by the differential gene expression from vaccinated (Delta, Triplex-CoV/MixCoV low and high dose groups) as compared to the PBS group (FIGS. 45-46). To gain a broad, unbiased view of these transcriptomic changes, we performed a series of gene set and pathway analyses. These analyses revealed a number of altered pathways in the vaccinated animals B cells, CD4 T cells and CD8 T cells as compared to the PBS group (FIG. 45A). Because the altered pathways are diverse, we also performed clustering analysis to uncover the key signal by grouping them into “supra-pathways” where multiple gene sets of similar function were altered. This network analysis of enriched pathways of differentially expressed genes highlighted the most significantly enriched member pathways (as meta-pathway), for the main adaptive immune cell types (B and T cells), for the three vaccination groups (FIG. 45B).

[0419] In order to further distinguish the directions, the Ridge density plots were also created, showing the expression log fold change meta-pathway genes between different vaccination groups in different cell types (FIG. 46B). Consistent with the prior observations, the differentially expressed pathways in B cells include leukocyte/lymphocyte mediated immunity in all three vaccination groups compared to PBS (FIG. 45B; FIG. 46B). A top enriched pathway of the differentially expressed genes in B cells is B cell activation, where all three vaccines induced a higher expression of these genes (FIGS. 46B-46C). In CD4 and CD8 T cells, common gene sets are observed, including immune system processes, immune cell differentiation, and T cell activation, consistent with the expected induction from vaccination (FIG. 45B; FIGS. 46B-46C). Interestingly, in T cells, in the differentially expressed genes in all three vaccines, besides regulation of T cell activation, leukocyte proliferation, leukocyte differentiation, defense response to virus and immune responses; basic fundamental pathways are also enriched, especially those involved in core cellular and metabolic functions such as apoptosis, translation, ubiquitin ligase activity, oxidative phosphorylation, mitochondria electron transport, respiratory chain activities (FIGS. 46B-C; FIG. 45B), consistent with the expectation that T cells are metabolically active upon vaccination. The Triplex vaccination induced strong B cell activation pathway clusters in B cells, as well as immune cell differentiation and metabolic activity gene sets in T cells (FIG. 45B; FIGS. 46B-C). These data reveal the broad gene expression signatures at the pathway and cluster levels, across the main adaptive immune cells (B and T cells), for the three vaccination groups studied. The transcriptomic signatures are largely coherent with the literature that these pathways are important for immunity against coronavirus infection and host defense, as well as vaccine-induced immune responses. These data revealed meta-pathway level gene expression changes in the B and T cells' transcriptomes of the animals receiving multiplexed vaccination.

Direct Comparison of Sequential Vs. Simultaneous Vaccination Schedules for LNP-mRNA Vaccination Against Three Species.

[0420] As observed above, Triplex LNP-mRNA vaccination is associated with reduction of antibody responses (FIGS. 38-40), we hypothesized that splitting such vaccination into separate doses may be a strategy to mitigate this loss of effectiveness. It was therefore sought to perform a sequential vaccination schedule and test it in parallel with simultaneous vaccination with mRNAs in mixture (FIG. 42A). In the Sequential vaccination schedule, vaccinations of SARS-CoV-2 Delta, MERS-CoV, and SARS-CoV were given in sequence separated by 3 weeks, each with 1 μg LNP-mRNA prime and 1 μg LNP-mRNA boost 3 weeks apart. In the Mixture vaccination schedule, vaccinations of SARS-CoV-2 Delta, MERS-CoV, and SARS-CoV were given simultaneously, each at 1 μg LNP-mRNA (3 μg total) for both prime and boost. To generate comparable data, we started the first dose at the same day (day 0), and harvested the blood sample at the same day (day 119, i.e. 4 months, post first dose), for both sequential and mixture schedules (FIG. 42A).

[0421] Antibody titers were measured from plasma samples of both Sequential and Mixture LNP-mRNA vaccinated animals (FIG. 42B; FIGS. 47-48). While all vaccinated animals showed certain antibody responses across all antigens tested (SARS2 WT/WA1, SARS2 Delta, SARS, MERS; both ECD and RBD), Sequential vaccination group showed significantly higher antibody responses than Mixture vaccination group across all conditions, i.e. across all antigens from these three species (FIG. 42). Similar with the results above, the ELISA ECD activity highly correlated with that of RBD (FIG. 54B). We tested the neutralization activities using the same pseudovirus assays (FIGS. 42C-42D). Again, mice in the Sequential vaccination schedule showed significantly higher neutralization activities than those in the Mixture vaccination group, and across all three species (FIGS. 42C-42D). Noted that similar to the previous experiment (FIG. 39), the MERS neutralization activity was almost completely lost at this time point in the Mixture vaccination group, yet the Sequential vaccination group retained significant activity above background (FIG. 42D). Overall, such neutralization activities significantly correlated with ECD ELISA for all groups or all mice, among the spike antigens and pseudoviruses tested (FIG. 48C). These data suggested that, for LNP-mRNA vaccination against three coronavirus species under the conditions tested, vaccination in sequence can elicit more potent antibody responses than vaccination simultaneously in mixture.

[0422] To comprehensively evaluate the cognate and cross-reactive antibody response induced by the Sequential and Mixture LNP-mRNA vaccination, we conducted blocking ELISA where soluble spike antigens or competing agents partially block the plasma antibody response to the homologous or heterologous spike antigen coated on the ELISA plates. The antibody response of Sequential and Triplex samples at matched time points (day 35 in FIG. 38 and day 119 in FIG. 42) in presence and absence of competing agents were directly compared in blocking ELISA. In the absence of competing agents (PBS control), the Triplex's antibody titers against all three spikes (Delta, SARS and MERS ECDs) significantly declined over time (day 35 vs. day 119 in FIG. 42E; FIG. 49). Sequential samples on day 35 before exposure to SARS and MERS antigens only displayed low or moderate activity against MERS and SARS ECDs. At two weeks post final immunization, Sequential samples (day 119) showed a universal trend of higher antibody titers than Triplex (day 35). Under equal mass condition of antigen mRNA in both Sequential and Triplex vaccination, antibody response to SARS was greater than Delta, of which antibody titer was higher than MERS, indicative of distinct immunogenicity of spike antigens from different coronavirus species.

[0423] Compared to heterologous blockers, homologous blockers (same spike as ELISA antigen) unequivocally led to greater titer reduction, which ranged from 30% to 70% decrease and represents maximum achievable blocking effect under current conditions (FIG. 42E; FIG. 49). Significant titer reductions by heterologous blockers were associated with cross-species antibodies and observed in Sequential vaccination (day 119) response to Delta ECD by SARS blocker and Sequential/Delta vaccination (day 35) response to SARS ECD by MERS blocker (comparison bracket colored in red in FIG. 42E). Most of heterologous blockers mediated very limited antibody titer reduction, suggesting that cross-coronavirus species antibodies, if exist, only account for a small population of Sequential or Triplex vaccine-induced antibodies. The fact that no heterologous blocker induced significant titer changes in Triplex group suggests that simultaneous exposure to all three coronavirus spike antigens mainly elicits species-specific antibodies, not cross-species antibodies. In most cases, Sequential (day35) or Delta vaccination showed stronger cross reactivity or heterologous blocking effect than other vaccination schemes (FIG. 49), except for Sequential vaccination (day 119) response to Delta ECD by SARS blocker. It is worth noting that despite of the absence of Delta antigen stimulation in Sequential vaccination since day 21, subsequent SARS and MERS antigen immunizations further elevated antibody titer against Delta. The significant blocking effect of SARS ECD on Sequential vaccination (day 119) response to Delta ECD revealed that the Delta titer increase by heterologous boosters was mainly mediated by SARS antigen not MERS antigen. Interestingly, the Sequential vaccination (day 119 vs. day 35) lost strong heterologous blocking effect in SARS and MERS ELISA panels (FIG. 49) suggests that the SARS and MERS antigens predominantly elicited cognate species-specific antibodies, eclipsing the cross-species antibodies observed in Delta vaccination.

### Selected Discussion

[0424] Pathogenic coronaviruses have emerged multiple times and infected human populations, several of which (SARS-CoV, MERS-CoV, SARS-CoV-2) have caused severe diseases and fatalities. Several existing less pathogenic coronavirus species (e.g. NL63, 2293, OC43, and HKU1) have been reported to have evolved hundreds to tens of thousands of years ago, and might have evolved to be co-existing with human without causing severe symptoms. Therefore, it is critical to have vaccines against multiple coronavirus species, ideally as pan-coronavirus vaccines, to help fight not only the current pandemic, but also to prevent the re-emergence of the previously existed pathogenic species, as well as constantly evolving and lurking coronavirus diseases as probable future outbreaks. Equally importantly, it is a long-standing need to gain the fundamental understanding of the immune response and the immunological landscape of joint host responses in the context of multiplex coronavirus vaccine.

[0425] Various prior efforts led to the development of SARS and MERS vaccine candidates, although at earlier stages of development. The COVID-19 pandemic urged an international effort for rapid development of vaccines against SARS-CoV-2, leading to multiple successful candidates including the highly efficacious mRNA vaccines. However, all these vaccines target a single species and may not offer sufficient protection against other pathogenic species.

[0426] To date no study has tested the multiplexing of mRNA vaccines against three major pathogenic coronavirus species (MERS/SARS/SARS2) in triplex setting, nor in sequence. The study of the present disclosure generated a full-length MERS LNP-mRNA vaccine construct, and tested it alone, in combination with SARS-CoV vaccine, SARS-CoV-2 vaccine, and in triplex. The present study directly generated mRNA vaccine candidates and tested in several LNP-mRNA combinations against MERS-CoV, SARS-CoV and SARS-CoV-2, and profiled the immune responses at the single cell level.

[0427] The present study reported the antibody responses of triplex and duplex LNP-mRNA vaccines based on MERS spike in combination with SARS and/or SARS2 Delta spikes. The level of cross-reactivity of induced antibodies was in concordance with the sequence identity between vaccine antigen and binding antigen tested in ELISA and pseudovirus assay. The MERS Duplex vaccines, especially when combined with Delta spike, demonstrated significant efficacy against SARS-CoV, SARS-CoV-2 Delta and MERS-CoV. Different from the prior studies, the antiviral spectrum tested herein covers three highly pathogenic coronavirus species in the Betacoronavirus genus, and goes beyond the group 2b coronavirus category (Sarbecoviruses), as it includes MERS in the Merbecovirus subgenus. The data showed that because of low sequence similarity, the vaccine based on Sarbecovirus (SARS and SARS2) provide little or no protection against MERS, the most fatal coronavirus to date with a 35% mortality rate. To broaden vaccine's anti-coronavirus spectrum, the triplex LNP-mRNA vaccine including SARS, SARS2 and MERS was designed and tested. The relatively low level of MERS neutralizing antibody in Triplex vaccine marked a significant challenge of introducing cross-lineage antigens in multiplex vaccination. In order to overcome this hurdle, we kept the species spectrum but reduced the same-lineage antigen number and increase mRNA doses, which gave rise to the Duplex vaccine design. The MERS+SARS2 Delta Duplex showed potent activity against MERS and SARS2 Delta, and to some degree against SARS by cross-reactivity.

[0428] To achieve sufficient and broad protection of neutralizing antibodies in multiplex vaccine against these coronavirus species, the relative composition, or the scheme of vaccination, need to be carefully considered in the future. In addition to the multiplexing approach we showed in this study, there are other ways of inducing protective antibodies against SARS2 Delta, SARS and MERS. The production and manufacturing procedures of multiplexed LNP-mRNA formulations, such as mixing, normalization and encapsulation, may benefit from further optimization and testing in the future. Alternatively, the three spike LNP-mRNAs can be given sequentially to avoid negative interactions between spike antigens seen in triplex vaccine. In fact, this is one of the clinical precautions, where individuals are advised to take the COVID-19 mRNA vaccine at least two weeks away from taking other vaccines. Consistent with this notion, our data with direct comparisons in animal vaccination experiments suggested that, giving the mRNA vaccine shots in sequence may benefit from higher antibody titers over a long period of time than giving mRNAs simultaneously in mixture. We directly compared antibody titers 14 days after final dose of sequential vaccination and triplex vaccination (FIG. 47, Delta-sequential vs. MixCoV-2 weeks). MixCoV group antibody titers against SARS1 and SARS2 variants were comparable to Delta-sequential group, while its MERS immunity tends to be lower than sequential vaccination. This is potentially due to competition in antigens, immunodominance, and other reasons. 3 months after the final dose of triplex vaccine, the titers of triplex vaccination declined by ˜10 fold and were significantly lower than those of sequential vaccination, which maintained high antibody titers against all three coronavirus pathogens at day 119 partially due to continuous vaccine boosting over time.

[0429] In summary, this study provided LNP-mRNA vaccine constructs designed to target SARS-CoV, SARS-CoV-2 Delta and MERS-CoV, as well as direct in vivo animal testing and single cell immune profiling results of multiplexed combinations as well as comparative vaccination schedules.

### Example 8: Comparison of Antibody Responses to BA.2 and BA.5 by mRNA Vaccines of Full-Length Spikes and RBD Trimer, Ferritin or hPEG10 Nanoparticles

[0430] To evaluate the immunogenicity of different types of spike LNP mRNAs, two full length spike LNP mRNAs (WT and BA.2 full lengths) and three BA.2 RBD-based LNP mRNAs were generated (FIG. 50A-50B), which contain N-term tissue plasminogen activator (tPA) signal peptide and C-term T4 fibritin trimer foldon (BA.2-RBD-trimer). The ferritin or human PEG10 (hPEG10) nanoparticle sequence was appended to the C terminus of two RBD-based LNP mRNAs (BA.2-RBD-ferritin/hPEG10). The size distribution of five generated LNPs were characterized by dynamic light scattering, which showed homogenous and monodispersed nanoparticles on the radius histogram (FIG. 51). Mice were immunized with two doses of 5 μg same spike LNP mRNAs on day 0 and day 14 (FIG. 50C). Plasma samples were isolated from blood collected on day 0 and day 28 for evaluating binding and neutralizing antibody response in ELISA and pseudovirus neutralization assay.

[0431] As expected, no spike RBD binding antibody was detected in all pre-vaccination samples collected on day 0 (FIG. 52 and FIG. 50C). Two weeks post boost, all five types of spike LNP-mRNAs elicited significant antibodies binding to BA.2 and BA.5 RBDs. Compared to BA.2 antibodies, lower antibody levels and larger variations were observed in BA.5 binding antibodies, suggestive of BA.5 mediated immune evasion from immunity elicited by WT or BA.2 LNP mRNA. The antibody titers induced by BA.2-RBD-PEG10 LNP mRNA were significantly lower than other four LNP mRNAs. BA.2 binding antibody titer of BA.2 full length LNP mRNA was significantly higher than that of WT LNP mRNA.

[0432] The BA.5 pseudovirus neutralizing titers separated five vaccination groups into two categories with low or high neutralizing activity (FIG. 53 and FIG. 50d). The BA.2 full length and BA.2-RBD-trimer vaccination groups exhibited high neutralizing activity against both BA.2 and BA.5, suggesting that their neutralizing antibodies maintained high cross reactivity with BA.5 subvariant. With much shorter antigen sequence, the BA.2-RBD-trimer induced neutralizing antibody titers comparable to that of BA.2 full length. The WT full length and BA.2-RBD-ferritin/hPEG10 vaccination groups showed limited BA.5 neutralizing activity. Among the five vaccination groups, more evident drops of neutralizing titers from BA.2 to BA.5 datasets were observed in BA.2-RBD-ferritin/hPEG10 vaccination groups (FIG. 54), suggesting that BA.2 RBD presented on ferritin or hPEG10 nanoparticles induced neutralizing antibodies with low BA.5 cross reactivity.

[0433] The BA.2 binding and neutralizing antibody titers were well correlated with greater model deviations from the WT full length group, which showed high binding antibodies but low neutralizing titer (FIG. 50E). The BA.5 binding and neutralizing titers were not significantly correlated due to large variations in binding and neutralizing titers in the same group.

pZF72 tPA BA.2 RBD tri-ferritin
(SEQ ID NO: 123)
gacggatcgggagatctcccgatcccctatggtgcactctcagtacaatctgctctgatgccgcatag
ttaagccagtatctgctccctgcttgtgtgttggaggtcgctgagtagtgcgcgagcaaaatttaagc
tacaacaaggcaaggcttgaccgacaattgcatgaagaatctgcttagggttaggcgttttgcgctgc
ttcgcgatgtacgggccagatatacgcgttgacattgattattgactagttattaatagtaatcaatt
acggggtcattagttcatagcccatatatggagttccgcgttacataacttacggtaaatggcccgcc
tggctgaccgcccaacgacccccgcccattgacgtcaataatgacgtatgttcccatagtaacgccaa
tagggactttccattgacgtcaatgggtggagtatttacggtaaactgcccacttggcagtacatcaa
gtgtatcatatgccaagtacgccccctattgacgtcaatgacggtaaatggcccgcctggcattatgc
ccagtacatgaccttatgggactttcctacttggcagtacatctacgtattagtcatcgctattacca
tggtgatgcggttttggcagtacatcaatgggcgtggatagcggtttgactcacggggatttccaagt
ctccaccccattgacgtcaatgggagtttgttttggcaccaaaatcaacgggactttccaaaatgtcg
taacaactccgccccattgacgcaaatgggcggtaggcgtgtacggtgggaggtctatataagcagag
ctctctggctaactagagaacccactgcttactggcttatcgaaattaatacgactcactatagggag
acccaagctggctagccaccGAGAATAAACTAGTATTCTTCTGGTCCCCACAGACTCAGAGAGAACCC
GCCACCATGGACGCCATGAAGAGAGGCCTGTGCTGCGTGCTGCTGCTGTGCGGCGCCGTGTTCGTGAG
CCCTAGCAGGGTCCAACCAACAGAGAGCATTGTGAGGTTTCCAAACATCACCAACCTGTGTCCATTTG
acGAGGTGTTCAAcGCCACCAGGTTTGCCTCTGTCTATGCCTGGAACAGGAAGAGGATTAGCAACTGT
GTGGCTGACTACTCTGTGCTCTACAACTTCGCCcCCTTCttCGCCTTCAAGTGTTATGGAGTGAGCCC
AACCAAACTGAATGACCTGTGTTTCACCAATGTCTATGCTGACTCCTTTGTGATTAGGGGAAACGAGG
TGAGCCAGATTGCCCCTGGACAAACAGGCAAcATTGCTGACTACAACTACAAACTGCCTGATGACTTC
ACAGGCTGTGTGATTGCCTGGAACAGCAACAAgCTGGACAGCAAGGTGGGCGGCAACTACAACTACCT
CTACAGACTGTTCAGGAAGAGCAACCTGAAACCATTTGAGAGGGACATCAGCACAGAGATTTACCAGG
CTGGCAaCAagCCATGTAATGGAGTGGccGGCTTCAACTGTTACTTTCCACTCCggTCCTATGGCTTC
CggCCAACCtacGGAGTGGGCcACCAACCATACAGGGTGGTGGTGCTGTCCTTTGAACTGCTCCATGC
CCCTGCCACAGTGTGTGGACCAAAGAAGAGCACCAACCTGGTGAAGAACAAGTGTGTGAACTTCGGCA
GCGGCGGCTACATCCCCGAGGCCCCTAGAGACGGCCAAGCCTACGTGAGAAAGGACGGCGAATGGGTA
CTCCTGAGCACCTTCCTGGGTGGCGGAGGCAGCGGCGGGGGAGGCAGCCTGTCCAAGGACATCATCAA
GCTGCTGAACGAGCAAGTGAACAAGGAGATGAACAGCAGCAACCTGTACATGAGCATGAGCAGCTGGT
GCTACACCCACAGCCTGGACGGCGCCGGCCTGTTCCTGTTCGACCACGCCGCCGAGGAGTACGAGCAC
GCCAAGAAGCTGATCATCTTCCTGAACGAGAACAACGTGCCCGTGCAGCTGACAAGCATCAGCGCCCC
CGAGCACAAGTTCGAGGGCCTGACACAGATCTTTCAGAAGGCCTACGAGCACGAGCAGCACATCAGCG
AGAGCATCAACAACATCGTGGACCACGCCATCAAGAGCAAGGACCACGCCACCTTCAACTTCCTGCAG
TGGTACGTGGCCGAGCAGCACGAGGAAGAGGTGCTGTTCAAGGACATCCTGGACAAGATCGAGCTGAT
CGGCAACGAGAACCACGGCCTGTACCTGGCCGATCAGTACGTGAAGGGCATCGCCAAGAGCAGAAAGA
GCTGATAATAGCTCGAGCTGGTACTGCATGCACGCAATGCTAGCTGCCCCTTTCCCGTCCTGGGTACC
CCGAGTCTCCCCCGACCTCGGGTCCCAGGTATGCTCCCACCTCCACCTGCCCCACTCACCACCTCTGC
TAGTTCCAGACACCTCCCAAGCACGCAGCAATGCAGCTCAAAACGCTTAGCCTAGCCACACCCCCACG
GGAAACAGCAGTGATTAACCTTTAGCAATAAACGAAAGTTTAACTAAGCTATACTAACCCCAGGGTTG
GTCAATTTCGTGCCAGCCACACCCTGGAGCTAGCaaaccgctgatcagcctcgactgtgccttctagt
tgccagccatctgttgtttgcccctcccccgtgccttccttgaccctggaaggtgccactcccactgt
cctttcctaataaaatgaggaaattgcatcgcattgtctgagtaggtgtcattctattctggggggtg
gggtggggcaggacagcaagggggaggattgggaagacaatagcaggcatgctggggatgcggtgggc
tctatggcttctgaggcggaaagaaccagctggggctctagggggtatccccacgcgccctgtagcgg
cgcattaagcgcggcgggtgtggtggttacgcgcagcgtgaccgctacacttgccagcgccctagcgc
ccgctcctttcgctttcttcccttcctttctcgccacgttcgccggctttccccgtcaagctctaaat
cgggggctccctttagggttccgatttagtgctttacggcacctcgaccccaaaaaacttgattaggg
tgatggttcacgtagtgggccatcgccctgatagacggtttttcgccctttgacgttggagtccacgt
tctttaatagtggactcttgttccaaactggaacaacactcaaccctatctcggtctattcttttgat
ttataagggattttgccgatttcggcctattggttaaaaaatgagctgatttaacaaaaatttaacgc
gaattaattctgtggaatgtgtgtcagttagggtgtggaaagtccccaggctccccagcaggcagaag
tatgcaaagcatgcatctcaattagtcagcaaccaggtgtggaaagtccccaggctccccagcaggca
gaagtatgcaaagcatgcatctcaattagtcagcaaccatagtcccgcccctaactccgcccatcccg
cccctaactccgcccagttccgcccattctccgccccatggctgactaattttttttatttatgcaga
ggccgaggccgcctctgcctctgagctattccagaagtagtgaggaggcttttttggaggcctaggct
tttgcaaaaagctcccgggagcttgtatatccattttcggatctgatcaagagacaggatgaggatcg
tttcgcatgattgaacaagatggattgcacgcaggttctccggccgcttgggtggagaggctattcgg
ctatgactgggcacaacagacaatcggctgctctgatgccgccgtgttccggctgtcagcgcaggggc
gcccggttctttttgtcaagaccgacctgtccggtgccctgaatgaactgcaggacgaggcagcgcgg
ctatcgtggctggccacgacgggcgttccttgcgcagctgtgctcgacgttgtcactgaagcgggaag
ggactggctgctattgggcgaagtgccggggcaggatctcctgtcatctcaccttgctcctgccgaga
aagtatccatcatggctgatgcaatgcggcggctgcatacgcttgatccggctacctgcccattcgac
caccaagcgaaacatcgcatcgagcgagcacgtactcggatggaagccggtcttgtcgatcaggatga
tctggacgaagagcatcaggggctcgcgccagccgaactgttcgccaggctcaaggcgcgcatgcccg
acggcgaggatctcgtcgtgacccatggcgatgcctgcttgccgaatatcatggtggaaaatggccgc
ttttctggattcatcgactgtggccggctgggtgtggcggaccgctatcaggacatagcgttggctac
ccgtgatattgctgaagagcttggcggcgaatgggctgaccgcttcctcgtgctttacggtatcgccg
ctcccgattcgcagcgcatcgccttctatcgccttcttgacgagttcttctgagcgggactctggggt
tcgaaatgaccgaccaagcgacgcccaacctgccatcacgagatttcgattccaccgccgccttctat
gaaaggttgggcttcggaatcgttttccgggacgccggctggatgatcctccagcgcggggatctcat
gctggagttcttcgcccaccccaacttgtttattgcagcttataatggttacaaataaagcaatagca
tcacaaatttcacaaataaagcatttttttcactgcattctagttgtggtttgtccaaactcatcaat
gtatcttatcatgtctgtataccgtcgacctctagctagagcttggcgtaatcatggtcatagctgtt
tcctgtgtgaaattgttatccgctcacaattccacacaacatacgagccggaagcataaagtgtaaag
cctggggtgcctaatgagtgagctaactcacattaattgcgttgcgctcactgcccgctttccagtcg
ggaaacctgtcgtgccagctgcattaatgaatcggccaacgcgcggggagaggcggtttgcgtattgg
gcgctcttccgcttcctcgctcactgactcgctgcgctcggtcgttcggctgcggcgagcggtatcag
ctcactcaaaggcggtaatacggttatccacagaatcaggggataacgcaggaaagaacatgtgagca
aaaggccagcaaaaggccaggaaccgtaaaaaggccgcgttgctggcgtttttccataggctccgccc
ccctgacgagcatcacaaaaatcgacgctcaagtcagaggtggcgaaacccgacaggactataaagat
accaggcgtttccccctggaagctccctcgtgcgctctcctgttccgaccctgccgcttaccggatac
ctgtccgcctttctcccttcgggaagcgtggcgctttctcatagctcacgctgtaggtatctcagttc
ggtgtaggtcgttcgctccaagctgggctgtgtgcacgaaccccccgttcagcccgaccgctgcgcct
tatccggtaactatcgtcttgagtccaacccggtaagacacgacttatcgccactggcagcagccact
ggtaacaggattagcagagcgaggtatgtaggcggtgctacagagttcttgaagtggtggcctaacta
cggctacactagaagaacagtatttggtatctgcgctctgctgaagccagttaccttcggaaaaagag
ttggtagctcttgatccggcaaacaaaccaccgctggtagcggtggtttttttgtttgcaagcagcag
attacgcgcagaaaaaaaggatctcaagaagatcctttgatcttttctacggggtctgacgctcagtg
gaacgaaaactcacgttaagggattttggtcatgagattatcaaaaaggatcttcacctagatccttt
taaattaaaaatgaagttttaaatcaatctaaagtatatatgagtaaacttggtctgacagttaccaa
tgcttaatcagtgaggcacctatctcagcgatctgtctatttcgttcatccatagttgcctgactccc
cgtcgtgtagataactacgatacgggagggcttaccatctggccccagtgctgcaatgataccgcgag
acccacgctcaccggctccagatttatcagcaataaaccagccagccggaagggccgagcgcagaagt
ggtcctgcaactttatccgcctccatccagtctattaattgttgccgggaagctagagtaagtagttc
gccagttaatagtttgcgcaacgttgttgccattgctacaggcatcgtggtgtcacgctcgtcgtttg
gtatggcttcattcagctccggttcccaacgatcaaggcgagttacatgatcccccatgttgtgcaaa
aaagcggttagctccttcggtcctccgatcgttgtcagaagtaagttggccgcagtgttatcactcat
ggttatggcagcactgcataattctcttactgtcatgccatccgtaagatgcttttctgtgactggtg
agtactcaaccaagtcattctgagaatagtgtatgcggcgaccgagttgctcttgcccggcgtcaata
cgggataataccgcgccacatagcagaactttaaaagtgctcatcattggaaaacgttcttcggggcg
aaaactctcaaggatcttaccgctgttgagatccagttcgatgtaacccactcgtgcacccaactgat
cttcagcatcttttactttcaccagcgtttctgggtgagcaaaaacaggaaggcaaaatgccgcaaaa
aagggaataagggcgacacggaaatgttgaatactcatactcttcctttttcaatattattgaagcat
ttatcagggttattgtctcatgagcggatacatatttgaatgtatttagaaaaataaacaaatagggg
ttccgcgcacatttccccgaaaagtgccacctgacgtc
pZF73v4_tPA_BA2_RBD_tri_hPEG10_mRNA
(SEQ ID NO: 124)
gacggatcgggagatctcccgatcccctatggtgcactctcagtacaatctgctctgatgccgcatag
ttaagccagtatctgctccctgcttgtgtgttggaggtcgctgagtagtgcgcgagcaaaatttaagc
tacaacaaggcaaggcttgaccgacaattgcatgaagaatctgcttagggttaggcgttttgcgctgc
ttcgcgatgtacgggccagatatacgcgttgacattgattattgactagttattaatagtaatcaatt
acggggtcattagttcatagcccatatatggagttccgcgttacataacttacggtaaatggcccgcc
tggctgaccgcccaacgacccccgcccattgacgtcaataatgacgtatgttcccatagtaacgccaa
tagggactttccattgacgtcaatgggtggagtatttacggtaaactgcccacttggcagtacatcaa
gtgtatcatatgccaagtacgccccctattgacgtcaatgacggtaaatggcccgcctggcattatgc
ccagtacatgaccttatgggactttcctacttggcagtacatctacgtattagtcatcgctattacca
tggtgatgcggttttggcagtacatcaatgggcgtggatagcggtttgactcacggggatttccaagt
ctccaccccattgacgtcaatgggagtttgttttggcaccaaaatcaacgggactttccaaaatgtcg
taacaactccgccccattgacgcaaatgggcggtaggcgtgtacggtgggaggtctatataagcagag
ctctctggctaactagagaacccactgcttactggcttatcgaaattaatacgactcactatagggag
acccaagctggctagccaccGAGAATAAACTAGTATTCTTCTGGTCCCCACAGACTCAGAGAGAACCC
GCCACCATGGACGCCATGAAGAGAGGCCTGTGCTGCGTGCTGCTGCTGTGCGGCGCCGTGTTCGTGAG
CCCTAGCAGGGTCCAACCAACAGAGAGCATTGTGAGGTTTCCAAACATCACCAACCTGTGTCCATTTG
acGAGGTGTTCAAcGCCACCAGGTTTGCCTCTGTCTATGCCTGGAACAGGAAGAGGATTAGCAACTGT
GTGGCTGACTACTCTGTGCTCTACAACTTCGCCcCCTTCttCGCCTTCAAGTGTTATGGAGTGAGCCC
AACCAAACTGAATGACCTGTGTTTCACCAATGTCTATGCTGACTCCTTTGTGATTAGGGGAAACGAGG
TGAGCCAGATTGCCCCTGGACAAACAGGCAAcATTGCTGACTACAACTACAAACTGCCTGATGACTTC
ACAGGCTGTGTGATTGCCTGGAACAGCAACAAgCTGGACAGCAAGGTGGGCGGCAACTACAACTACCT
CTACAGACTGTTCAGGAAGAGCAACCTGAAACCATTTGAGAGGGACATCAGCACAGAGATTTACCAGG
CTGGCAaCAagCCATGTAATGGAGTGGccGGCTTCAACTGTTACTTTCCACTCCggTCCTATGGCTTC
CggCCAACCtacGGAGTGGGCcACCAACCATACAGGGTGGTGGTGCTGTCCTTTGAACTGCTCCATGC
CCCTGCCACAGTGTGTGGACCAAAGAAGAGCACCAACCTGGTGAAGAACAAGTGTGTGAACTTCGGCT
CAGGTGGTTACATACCAGAGGCACCCAGGGACGGTCAGGCCTATGTGAGGAAAGACGGTGAGTGGGTG
TTGCTGTCCACGTTTCTCGGCGGTGGCGGTTCCGGCGGTGGTGGGTCTATGCTTGGCCCTGATTGTCC
GCCACCTCCACCGCCCCCGCCACCCAACAACAATAACAATAATAATAGTAAGCATACAGGTCATAAGA
GTGCGTGCGTTCCTAATATGACAGAGCGGCGCAGGGATGAACTGTCCGAAGAAATTAATAACCTTAGG
GAAAAAGTAATGAAGCAATCCGAGGAAAATAATAATTTGCAATCTCAAGTGCAGAAACTCACGGAAGA
AAATACCACGCTTAGAGAACAGGTGGAGCCGACTCCAGAGGACGAAGATGATGATATTGAGCTCAGGG
GCGCTGCAGCTGCCGCAGCTCCTCCACCTCCGATAGAGGAAGAGTGTCCTGAAGACTTGCCTGAAAAG
TTCGACGGCAACCCTGACATGTTGGCACCTTTTATGGCTCAGTGTCAGATATTTATGGAGAAGAGTAC
CAGGGATTTTTCAGTCGATCGCGTTCGCGTCTGCTTCGTGACGAGCATGATGACCGGTAGAGCTGCTC
GATGGGCTTCAGCTAAGCTTGAACGCTCCCACTATCTTATGCATAATTATCCGGCATTTATGATGGAG
ATGAAGCACGTGTTTGAAGACCCCCAGCGCAGGGAGGTCGCTAAAAGGAAGATAAGGAGACTCAGACA
AGGAATGGGTTCTGTCATTGATTATTCTAACGCTTTCCAGATGATAGCACAGGATCTTGATTGGAATG
AACCCGCTCTTATTGACCAGTACCACGAAGGTCTCTCAGACCATATCCAAGAAGAACTTTCACATCTG
GAGGTCGCTAAGAGCCTGTCTGCTCTCATTGGTCAGTGTATCCATATAGAGCGGCGGCTCGCAAGGGC
GGCTGCGGCCAGAAAACCCCGATCCCCGCCCCGAGCCCTCGTCCTGCCCCATATTGCCTCTCATCATC
AAGTAGATCCTACCGAGCCTGTGGGAGGAGCGCGGATGCGGCTTACCCAAGAGGAATGATAATAGCTC
GAGCTGGTACTGCATGCACGCAATGCTAGCTGCCCCTTTCCCGTCCTGGGTACCCCGAGTCTCCCCCG
ACCTCGGGTCCCAGGTATGCTCCCACCTCCACCTGCCCCACTCACCACCTCTGCTAGTTCCAGACACC
TCCCAAGCACGCAGCAATGCAGCTCAAAACGCTTAGCCTAGCCACACCCCCACGGGAAACAGCAGTGA
TTAACCTTTAGCAATAAACGAAAGTTTAACTAAGCTATACTAACCCCAGGGTTGGTCAATTTCGTGCC
AGCCACACCCTGGAGCTAGCaaaccgctgatcagcctcgactgtgccttctagttgccagccatctgt
tgtttgcccctcccccgtgccttccttgaccctggaaggtgccactcccactgtcctttcctaataaa
atgaggaaattgcatcgcattgtctgagtaggtgtcattctattctggggggtggggtggggcaggac
agcaagggggaggattgggaagacaatagcaggcatgctggggatgcggtgggctctatggcttctga
ggcggaaagaaccagctggggctctagggggtatccccacgcgccctgtagcggcgcattaagcgcgg
cgggtgtggtggttacgcgcagcgtgaccgctacacttgccagcgccctagcgcccgctcctttcgct
ttcttcccttcctttctcgccacgttcgccggctttccccgtcaagctctaaatcgggggctcccttt
agggttccgatttagtgctttacggcacctcgaccccaaaaaacttgattagggtgatggttcacgta
gtgggccatcgccctgatagacggtttttcgccctttgacgttggagtccacgttctttaatagtgga
ctcttgttccaaactggaacaacactcaaccctatctcggtctattcttttgatttataagggatttt
gccgatttcggcctattggttaaaaaatgagctgatttaacaaaaatttaacgcgaattaattctgtg
gaatgtgtgtcagttagggtgtggaaagtccccaggctccccagcaggcagaagtatgcaaagcatgc
atctcaattagtcagcaaccaggtgtggaaagtccccaggctccccagcaggcagaagtatgcaaagc
atgcatctcaattagtcagcaaccatagtcccgcccctaactccgcccatcccgcccctaactccgcc
cagttccgcccattctccgccccatggctgactaattttttttatttatgcagaggccgaggccgcct
ctgcctctgagctattccagaagtagtgaggaggcttttttggaggcctaggcttttgcaaaaagctc
ccgggagcttgtatatccattttcggatctgatcaagagacaggatgaggatcgtttcgcatgattga
acaagatggattgcacgcaggttctccggccgcttgggtggagaggctattcggctatgactgggcac
aacagacaatcggctgctctgatgccgccgtgttccggctgtcagcgcaggggcgcccggttcttttt
gtcaagaccgacctgtccggtgccctgaatgaactgcaggacgaggcagcgcggctatcgtggctggc
cacgacgggcgttccttgcgcagctgtgctcgacgttgtcactgaagcgggaagggactggctgctat
tgggcgaagtgccggggcaggatctcctgtcatctcaccttgctcctgccgagaaagtatccatcatg
gctgatgcaatgcggcggctgcatacgcttgatccggctacctgcccattcgaccaccaagcgaaaca
tcgcatcgagcgagcacgtactcggatggaagccggtcttgtcgatcaggatgatctggacgaagagc
atcaggggctcgcgccagccgaactgttcgccaggctcaaggcgcgcatgcccgacggcgaggatctc
gtcgtgacccatggcgatgcctgcttgccgaatatcatggtggaaaatggccgcttttctggattcat
cgactgtggccggctgggtgtggcggaccgctatcaggacatagcgttggctacccgtgatattgctg
aagagcttggcggcgaatgggctgaccgcttcctcgtgctttacggtatcgccgctcccgattcgcag
cgcatcgccttctatcgccttcttgacgagttcttctgagcgggactctggggttcgaaatgaccgac
caagcgacgcccaacctgccatcacgagatttcgattccaccgccgccttctatgaaaggttgggctt
cggaatcgttttccgggacgccggctggatgatcctccagcgcggggatctcatgctggagttcttcg
cccaccccaacttgtttattgcagcttataatggttacaaataaagcaatagcatcacaaatttcaca
aataaagcatttttttcactgcattctagttgtggtttgtccaaactcatcaatgtatcttatcatgt
ctgtataccgtcgacctctagctagagcttggcgtaatcatggtcatagctgtttcctgtgtgaaatt
gttatccgctcacaattccacacaacatacgagccggaagcataaagtgtaaagcctggggtgcctaa
tgagtgagctaactcacattaattgcgttgcgctcactgcccgctttccagtcgggaaacctgtcgtg
ccagctgcattaatgaatcggccaacgcgcggggagaggcggtttgcgtattgggcgctcttccgctt
cctcgctcactgactcgctgcgctcggtcgttcggctgcggcgagcggtatcagctcactcaaaggcg
gtaatacggttatccacagaatcaggggataacgcaggaaagaacatgtgagcaaaaggccagcaaaa
ggccaggaaccgtaaaaaggccgcgttgctggcgtttttccataggctccgcccccctgacgagcatc
acaaaaatcgacgctcaagtcagaggtggcgaaacccgacaggactataaagataccaggcgtttccc
cctggaagctccctcgtgcgctctcctgttccgaccctgccgcttaccggatacctgtccgcctttct
cccttcgggaagcgtggcgctttctcatagctcacgctgtaggtatctcagttcggtgtaggtcgttc
gctccaagctgggctgtgtgcacgaaccccccgttcagcccgaccgctgcgccttatccggtaactat
cgtcttgagtccaacccggtaagacacgacttatcgccactggcagcagccactggtaacaggattag
cagagcgaggtatgtaggcggtgctacagagttcttgaagtggtggcctaactacggctacactagaa
gaacagtatttggtatctgcgctctgctgaagccagttaccttcggaaaaagagttggtagctcttga
tccggcaaacaaaccaccgctggtagcggtggtttttttgtttgcaagcagcagattacgcgcagaaa
aaaaggatctcaagaagatcctttgatcttttctacggggtctgacgctcagtggaacgaaaactcac
gttaagggattttggtcatgagattatcaaaaaggatcttcacctagatccttttaaattaaaaatga
agttttaaatcaatctaaagtatatatgagtaaacttggtctgacagttaccaatgcttaatcagtga
ggcacctatctcagcgatctgtctatttcgttcatccatagttgcctgactccccgtcgtgtagataa
ctacgatacgggagggcttaccatctggccccagtgctgcaatgataccgcgagacccacgctcaccg
gctccagatttatcagcaataaaccagccagccggaagggccgagcgcagaagtggtcctgcaacttt
atccgcctccatccagtctattaattgttgccgggaagctagagtaagtagttcgccagttaatagtt
tgcgcaacgttgttgccattgctacaggcatcgtggtgtcacgctcgtcgtttggtatggcttcattc
agctccggttcccaacgatcaaggcgagttacatgatcccccatgttgtgcaaaaaagcggttagctc
cttcggtcctccgatcgttgtcagaagtaagttggccgcagtgttatcactcatggttatggcagcac
tgcataattctcttactgtcatgccatccgtaagatgcttttctgtgactggtgagtactcaaccaag
tcattctgagaatagtgtatgcggcgaccgagttgctcttgcccggcgtcaatacgggataataccgc
gccacatagcagaactttaaaagtgctcatcattggaaaacgttcttcggggcgaaaactctcaagga
tcttaccgctgttgagatccagttcgatgtaacccactcgtgcacccaactgatcttcagcatctttt
actttcaccagcgtttctgggtgagcaaaaacaggaaggcaaaatgccgcaaaaaagggaataagggc
gacacggaaatgttgaatactcatactcttcctttttcaatattattgaagcatttatcagggttatt
gtctcatgagcggatacatatttgaatgtatttagaaaaataaacaaataggggttccgcgcacattt
ccccgaaaagtgccacctgacgtc
pZF91_tPA_BA2_RBD_tri_mRNA
(SEQ ID NO: 125)
gacggatcgggagatctcccgatcccctatggtgcactctcagtacaatctgctctgatgccgcatag
ttaagccagtatctgctccctgcttgtgtgttggaggtcgctgagtagtgcgcgagcaaaatttaagc
tacaacaaggcaaggcttgaccgacaattgcatgaagaatctgcttagggttaggcgttttgcgctgc
ttcgcgatgtacgggccagatatacgcgttgacattgattattgactagttattaatagtaatcaatt
acggggtcattagttcatagcccatatatggagttccgcgttacataacttacggtaaatggcccgcc
tggctgaccgcccaacgacccccgcccattgacgtcaataatgacgtatgttcccatagtaacgccaa
tagggactttccattgacgtcaatgggtggagtatttacggtaaactgcccacttggcagtacatcaa
gtgtatcatatgccaagtacgccccctattgacgtcaatgacggtaaatggcccgcctggcattatgc
ccagtacatgaccttatgggactttcctacttggcagtacatctacgtattagtcatcgctattacca
tggtgatgcggttttggcagtacatcaatgggcgtggatagcggtttgactcacggggatttccaagt
ctccaccccattgacgtcaatgggagtttgttttggcaccaaaatcaacgggactttccaaaatgtcg
taacaactccgccccattgacgcaaatgggcggtaggcgtgtacggtgggaggtctatataagcagag
ctctctggctaactagagaacccactgcttactggcttatcgaaattaatacgactcactatagggag
acccaagctggctagccaccGAGAATAAACTAGTATTCTTCTGGTCCCCACAGACTCAGAGAGAACCC
GCCACCATGGACGCCATGAAGAGAGGCCTGTGCTGCGTGCTGCTGCTGTGCGGCGCCGTGTTCGTGAG
CCCTAGCAGGGTCCAACCAACAGAGAGCATTGTGAGGTTTCCAAACATCACCAACCTGTGTCCATTTG
acGAGGTGTTCAAcGCCACCAGGTTTGCCTCTGTCTATGCCTGGAACAGGAAGAGGATTAGCAACTGT
GTGGCTGACTACTCTGTGCTCTACAACTTCGCCcCCTTCttCGCCTTCAAGTGTTATGGAGTGAGCCC
AACCAAACTGAATGACCTGTGTTTCACCAATGTCTATGCTGACTCCTTTGTGATTAGGGGAAACGAGG
TGAGCCAGATTGCCCCTGGACAAACAGGCAAcATTGCTGACTACAACTACAAACTGCCTGATGACTTC
ACAGGCTGTGTGATTGCCTGGAACAGCAACAAgCTGGACAGCAAGGTGGGCGGCAACTACAACTACCT
CTACAGACTGTTCAGGAAGAGCAACCTGAAACCATTTGAGAGGGACATCAGCACAGAGATTTACCAGG
CTGGCAaCAagCCATGTAATGGAGTGGccGGCTTCAACTGTTACTTTCCACTCCggTCCTATGGCTTC
CggCCAACCtacGGAGTGGGCcACCAACCATACAGGGTGGTGGTGCTGTCCTTTGAACTGCTCCATGC
CCCTGCCACAGTGTGTGGACCAAAGAAGAGCACCAACCTGGTGAAGAACAAGTGTGTGAACTTCGGCA
GCGGCGGCTACATCCCCGAGGCCCCTAGAGACGGCCAAGCCTACGTGAGAAAGGACGGCGAATGGGTA
CTCCTGAGCACCTTCCTGGGTGGCGGAGGCAGCGGCGGGGGAGGCAGCTGATAATAGCTCGAGCTGGT
ACTGCATGCACGCAATGCTAGCTGCCCCTTTCCCGTCCTGGGTACCCCGAGTCTCCCCCGACCTCGGG
TCCCAGGTATGCTCCCACCTCCACCTGCCCCACTCACCACCTCTGCTAGTTCCAGACACCTCCCAAGC
ACGCAGCAATGCAGCTCAAAACGCTTAGCCTAGCCACACCCCCACGGGAAACAGCAGTGATTAACCTT
TAGCAATAAACGAAAGTTTAACTAAGCTATACTAACCCCAGGGTTGGTCAATTTCGTGCCAGCCACAC
CCTGGAGCTAGCaaaccgctgatcagcctcgactgtgccttctagttgccagccatctgttgtttgcc
cctcccccgtgccttccttgaccctggaaggtgccactcccactgtcctttcctaataaaatgaggaa
attgcatcgcattgtctgagtaggtgtcattctattctggggggtggggtggggcaggacagcaaggg
ggaggattgggaagacaatagcaggcatgctggggatgcggtgggctctatggcttctgaggcggaaa
gaaccagctggggctctagggggtatccccacgcgccctgtagcggcgcattaagcgcggcgggtgtg
gtggttacgcgcagcgtgaccgctacacttgccagcgccctagcgcccgctcctttcgctttcttccc
ttcctttctcgccacgttcgccggctttccccgtcaagctctaaatcgggggctccctttagggttcc
gatttagtgctttacggcacctcgaccccaaaaaacttgattagggtgatggttcacgtagtgggcca
tcgccctgatagacggtttttcgccctttgacgttggagtccacgttctttaatagtggactcttgtt
ccaaactggaacaacactcaaccctatctcggtctattcttttgatttataagggattttgccgattt
cggcctattggttaaaaaatgagctgatttaacaaaaatttaacgcgaattaattctgtggaatgtgt
gtcagttagggtgtggaaagtccccaggctccccagcaggcagaagtatgcaaagcatgcatctcaat
tagtcagcaaccaggtgtggaaagtccccaggctccccagcaggcagaagtatgcaaagcatgcatct
caattagtcagcaaccatagtcccgcccctaactccgcccatcccgcccctaactccgcccagttccg
cccattctccgccccatggctgactaattttttttatttatgcagaggccgaggccgcctctgcctct
gagctattccagaagtagtgaggaggcttttttggaggcctaggcttttgcaaaaagctcccgggagc
ttgtatatccattttcggatctgatcaagagacaggatgaggatcgtttcgcatgattgaacaagatg
gattgcacgcaggttctccggccgcttgggtggagaggctattcggctatgactgggcacaacagaca
atcggctgctctgatgccgccgtgttccggctgtcagcgcaggggcgcccggttctttttgtcaagac
cgacctgtccggtgccctgaatgaactgcaggacgaggcagcgcggctatcgtggctggccacgacgg
gcgttccttgcgcagctgtgctcgacgttgtcactgaagcgggaagggactggctgctattgggcgaa
gtgccggggcaggatctcctgtcatctcaccttgctcctgccgagaaagtatccatcatggctgatgc
aatgcggcggctgcatacgcttgatccggctacctgcccattcgaccaccaagcgaaacatcgcatcg
agcgagcacgtactcggatggaagccggtcttgtcgatcaggatgatctggacgaagagcatcagggg
ctcgcgccagccgaactgttcgccaggctcaaggcgcgcatgcccgacggcgaggatctcgtcgtgac
ccatggcgatgcctgcttgccgaatatcatggtggaaaatggccgcttttctggattcatcgactgtg
gccggctgggtgtggcggaccgctatcaggacatagcgttggctacccgtgatattgctgaagagctt
ggcggcgaatgggctgaccgcttcctcgtgctttacggtatcgccgctcccgattcgcagcgcatcgc
cttctatcgccttcttgacgagttcttctgagcgggactctggggttcgaaatgaccgaccaagcgac
gcccaacctgccatcacgagatttcgattccaccgccgccttctatgaaaggttgggcttcggaatcg
ttttccgggacgccggctggatgatcctccagcgcggggatctcatgctggagttcttcgcccacccc
aacttgtttattgcagcttataatggttacaaataaagcaatagcatcacaaatttcacaaataaagc
atttttttcactgcattctagttgtggtttgtccaaactcatcaatgtatcttatcatgtctgtatac
cgtcgacctctagctagagcttggcgtaatcatggtcatagctgtttcctgtgtgaaattgttatccg
ctcacaattccacacaacatacgagccggaagcataaagtgtaaagcctggggtgcctaatgagtgag
ctaactcacattaattgcgttgcgctcactgcccgctttccagtcgggaaacctgtcgtgccagctgc
attaatgaatcggccaacgcgcggggagaggcggtttgcgtattgggcgctcttccgcttcctcgctc
actgactcgctgcgctcggtcgttcggctgcggcgagcggtatcagctcactcaaaggcggtaatacg
gttatccacagaatcaggggataacgcaggaaagaacatgtgagcaaaaggccagcaaaaggccagga
accgtaaaaaggccgcgttgctggcgtttttccataggctccgcccccctgacgagcatcacaaaaat
cgacgctcaagtcagaggtggcgaaacccgacaggactataaagataccaggcgtttccccctggaag
ctccctcgtgcgctctcctgttccgaccctgccgcttaccggatacctgtccgcctttctcccttcgg
gaagcgtggcgctttctcatagctcacgctgtaggtatctcagttcggtgtaggtcgttcgctccaag
ctgggctgtgtgcacgaaccccccgttcagcccgaccgctgcgccttatccggtaactatcgtcttga
gtccaacccggtaagacacgacttatcgccactggcagcagccactggtaacaggattagcagagcga
ggtatgtaggcggtgctacagagttcttgaagtggtggcctaactacggctacactagaagaacagta
tttggtatctgcgctctgctgaagccagttaccttcggaaaaagagttggtagctcttgatccggcaa
acaaaccaccgctggtagcggtggtttttttgtttgcaagcagcagattacgcgcagaaaaaaaggat
ctcaagaagatcctttgatcttttctacggggtctgacgctcagtggaacgaaaactcacgttaaggg
attttggtcatgagattatcaaaaaggatcttcacctagatccttttaaattaaaaatgaagttttaa
atcaatctaaagtatatatgagtaaacttggtctgacagttaccaatgcttaatcagtgaggcaccta
tctcagcgatctgtctatttcgttcatccatagttgcctgactccccgtcgtgtagataactacgata
cgggagggcttaccatctggccccagtgctgcaatgataccgcgagacccacgctcaccggctccaga
tttatcagcaataaaccagccagccggaagggccgagcgcagaagtggtcctgcaactttatccgcct
ccatccagtctattaattgttgccgggaagctagagtaagtagttcgccagttaatagtttgcgcaac
gttgttgccattgctacaggcatcgtggtgtcacgctcgtcgtttggtatggcttcattcagctccgg
ttcccaacgatcaaggcgagttacatgatcccccatgttgtgcaaaaaagcggttagctccttcggtc
ctccgatcgttgtcagaagtaagttggccgcagtgttatcactcatggttatggcagcactgcataat
tctcttactgtcatgccatccgtaagatgcttttctgtgactggtgagtactcaaccaagtcattctg
agaatagtgtatgcggcgaccgagttgctcttgcccggcgtcaatacgggataataccgcgccacata
gcagaactttaaaagtgctcatcattggaaaacgttcttcggggcgaaaactctcaaggatcttaccg
ctgttgagatccagttcgatgtaacccactcgtgcacccaactgatcttcagcatcttttactttcac
cagcgtttctgggtgagcaaaaacaggaaggcaaaatgccgcaaaaaagggaataagggcgacacgga
aatgttgaatactcatactcttcctttttcaatattattgaagcatttatcagggttattgtctcatg
agcggatacatatttgaatgtatttagaaaaataaacaaataggggttccgcgcacatttccccgaaa
agtgccacctgacgtc
Furin Cleavage
SEQ ID NO: 11
GSAS
fibritin Foldon
SEQ ID NO: 12
GYIPEAPRDGQAYVRKDGEWVLLSTF
Spy Tag
SEQ ID NO: 13
RGVPHIVMVDAYKRYK
SPY Catcher
SEQ ID NO: 14
VTTLSGLSGEQGPSGDMTTEEDSATHIKFSKRDEDGRELAGATMELRDSSGKTISTWISDGHVKDFYL
YPGKYTFVETAAPDGYEVATPIEFTVNEDGQVTVDGEATEGDAHT
Cleavage
SEQ ID NO: 15
RRAR
Cleavage
SEQ ID NO: 16
GSSS
Cleavage
SEQ ID NO: 17
GSGS
Omicron Spike Hexapro
SEQ ID NO: 46
FVFLVLLPLVSSQCVNLTTRTQLPPAYTNSFTRGVYYPDKVFRSSVLHSTQDLFLPFFSNVTWFHVIS
GTNGTKRFDNPVLPFNDGVYFASIEKSNIIRGWIFGTTLDSKTQSLLIVNNATNVVIKVCEFQFCNDP
FLDHKNNKSWMESEFRVYSSANNCTFEYVSQPFLMDLEGKQGNFKNLREFVFKNIDGYFKIYSKHTPI
IVREPEDLPQGFSALEPLVDLPIGINITRFQTLLALHRSYLTPGDSSSGWTAGAAAYYVGYLQPRTFL
LKYNENGTITDAVDCALDPLSETKCTLKSFTVEKGIYQTSNFRVQPTESIVRFPNITNLCPFDEVFNA
TRFASVYAWNRKRISNCVADYSVLYNLAPFFTFKCYGVSPTKLNDLCFTNVYADSFVIRGDEVRQIAP
GQTGNIADYNYKLPDDFTGCVIAWNSNKLDSKVSGNYNYLYRLFRKSNLKPFERDISTEIYQAGNKPC
NGVAGFNCYFPLRSYSFRPTYGVGHQPYRVVVLSFELLHAPATVCGPKKSTNLVKNKCVNFNFNGLKG
TGVLTESNKKFLPFQQFGRDIADTTDAVRDPQTLEILDITPCSFGGVSVITPGTNTSNQVAVLYQGVN
CTEVPVAIHADQLTPTWRVYSTGSNVFQTRAGCLIGAEYVNNSYECDIPIGAGICASYQTQTKSHGSA
SSVASQSIIAYTMSLGAENSVAYSNNSIAIPTNFTISVTTEILPVSMTKTSVDCTMYICGDSTECSNL
LLQYGSFCTQLKRALTGIAVEQDKNTQEVFAQVKQIYKTPPIKYFGGFNFSQILPDPSKPSKRSPIED
LLFNKVTLADAGFIKQYGDCLGDIAARDLICAQKFKGLTVLPPLLTDEMIAQYTSALLAGTITSGWTF
GAGPALQIPFPMQMAYRFNGIGVTQNVLYENQKLIANQFNSAIGKIQDSLSSTPSALGKLQDVVNHNA
QALNTLVKQLSSKFGAISSVLNDIFSRLDPPEAEVQIDRLITGRLQSLQTYVTQQLIRAAEIRASANL
AATKMSECVLGQSKRVDFCGKGYHLMSFPQSAPHGVVFLHVTYVPAQEKNFTTAPAICHDGKAHFPRE
GVFVSNGTHWFVTQRNFYEPQIITTDNTFVSGNCDVVIGIVNNTVYDPLQPELDSFKEELDKYFKNHT
SPDVDLGDISGINASVVNIQKEIDRLNEVAKNLNESLIDLQELGKYEQYIKWPWYIWLGFIAGLIAIV
MVTIMLCCMTSCCSCLKGCCSCGSCCKFDEDDSEPVLKGVKLHYT*
pAZ50-SARS-CoV-2 HexaPro-FIS-a
SEQ ID NO: 70
gtcgacattgattattgactagttattaatagtaatcaattacggggtcattagttcatagcccatat
atggagttccgcgttacataacttacggtaaatggcccgcctggctgaccgcccaacgacccccgccc
attgacgtcaataatgacgtatgttcccatagtaacgccaatagggactttccattgacgtcaatggg
tggactatttacggtaaactgcccacttggcagtacatcaagtgtatcatatgccaagtacgccccct
attgacgtcaatgacggtaaatggcccgcctggcattatgcccagtacatgaccttatgggactttcc
tacttggcagtacatctacgtattagtcatcgctattaccatgggtcgaggtgagccccacgttctgc
ttcactctccccatctcccccccctccccacccccaattttgtatttatttattttttaattattttg
tgcagcgatgggggcggggggggggggggcgcgcgccaggcggggcggggcggggcgaggggcggggc
ggggcgaggcggagaggtgcggcggcagccaatcagagcggcgcgctccgaaagtttccttttatggc
gaggcggcggcggcggcggccctataaaaagcgaagcgcgcggcgggcgggagtcgctgcgttgcctt
cgccccgtgccccgctccgcgccgcctcgcgccgcccgccccggctctgactgaccgcgttactccca
caggtgagcgggcgggacggcccttctcctccgggctgtaattagcgcttggtttaatgacggctcgt
ttcttttctgtggctgcgtgaaagccttaaagggctccgggagggccctttgtgcgggggggagcggc
tcggggggtgcgtgcgtgtgtgtgtgcgtggggagcgccgcgtgcggcccgcgctgcccggcggctgt
gagcgctgcgggcgcggcgcggggctttgtgcgctccgcgtgtgcgcgaggggagcgcggccgggggc
ggtgccccgcggtgcgggggggctgcgaggggaacaaaggctgcgtgcggggtgtgtgcgtggggggg
tgagcagggggtgtgggcgcggcggtcgggctgtaacccccccctgcacccccctccccgagttgctg
agcacggcccggcttcgggtgcggggctccgtgcggggcgtggcgcggggctcgccgtgccgggcggg
gggtggcggcaggtgggggtgccgggcggggcggggccgcctcgggccggggagggctcgggggaggg
gcgcggcggcccccggagcgccggcggctgtcgaggcgcggcgagccgcagccattgccttttatggt
aatcgtgcgagagggcgcagggacttcctttgtcccaaatctgtgcggagccgaaatctgggaggcgc
cgccgcaccccctctagcgggcgcggggcgaagcggtgcggcgccggcaggaaggaaatgggcgggga
gggccttcgtgcgtcgccgcgccgccgtccccttctccctctccagcctcggggctgtccgcgggggg
acggctgccttcgggggggacggggcagggcggggttcggcttctggcgtgtgaccggcggctctagc
gcctctgctaaccatgttcatgccttcttctttttcctacagctcctgggcaacgtgctggttgttgt
gctgtctcatcattttggcaaagaattgcggccgtctcaggccgagttcggtaccgccaccatgttcg
tgttcctggtgctcctgcctctggtgagcagccagtgcgtgaacctgaccacccgaacccagctccca
ccagcctacaccaacagctttacacggggcgtgtactaccctgacaaggtgttcagatctagcgtcct
gcacagcactcaggacctcttcctgccgttcttcagcaacgtgacatggttccacgccatccacgtga
gcggcacaaacggaaccaagcggtttgataaccccgtcctgccattcaatgatggagtttacttcgcc
agtaccgagaagagtaacatcatccggggctggatcttcggcaccaccctggatagcaaaacacagag
cctcctgatcgtgaacaatgccacgaacgtcgtgatcaaggtgtgcgagttccagttttgcaatgatc
ctttcctgggtgtgtactaccacaagaacaacaagagctggatggaaagcgagttcagagtctacagc
agcgccaacaactgcacattcgagtacgtctctcagccttttctgatggaccttgaggggaaacaagg
caacttcaagaacctgagagaattcgtgttcaagaacatcgacggctacttcaaaatctactccaagc
acacacccatcaacctggtccgggacctccctcagggcttcagcgccctggaacccctggtcgacctg
cccataggcatcaacataacgcggttccaaaccctgctggccctgcatagatcctacctgactcctgg
cgacagcagcagcggatggaccgccggagctgcagcctactatgtgggctacctgcaacctagaacct
tcctgctgaagtacaacgagaacggcacaatcacagacgccgtcgactgcgccctggaccctctctct
gagacaaagtgcaccctgaagtccttcaccgtggaaaagggcatctaccagaccagcaacttccgggt
gcagcctacagagagcatcgtgcgatttccaaacattaccaacctctgccccttcggcgaggtgttta
acgccacaagatttgcctccgtttacgcctggaatagaaagagaatcagcaattgtgtggccgactac
tccgtgctgtataacagcgcctctttcagcaccttcaagtgctacggcgtttccccaacaaagctgaa
tgacctgtgcttcaccaacgtgtacgccgactccttcgtaattagaggcgatgaggtgcggcagatcg
caccaggccagaccggtaagatcgctgactacaactataagctgcctgatgattttacaggctgcgtg
atcgcctggaactctaacaacctggatagcaaggtgggcggcaactacaactacctgtaccggctgtt
tcgcaagtctaacctgaaacctttcgagagagacatctccacagagatctaccaggccggttctacac
cttgtaacggggtggaaggcttcaactgttacttccctctgcaaagctacggcttccagcctaccaat
ggagtcggctaccagccataccgggtggtcgtgctgtccttcgagttactccacgcccccgccaccgt
ctgcggtcctaagaagtccaccaatctggttaagaacaaatgcgtgaacttcaacttcaacggcctga
ccgggaccggcgtgctgaccgaaagcaacaaaaagttcctccccttccagcagttcggccgtgatatc
gctgacaccacagatgccgtcagagatccacagaccctggaaatcctggatattacaccctgctcctt
cggaggagtttctgtgatcacccccgggaccaataccagcaaccaggtggctgtgctgtaccaagatg
ttaactgcaccgaggttcctgtggccatccacgccgatcagctgacacctacttggagagtgtactcc
actggctccaatgtgttccagaccagggccggatgtctgatcggcgccgagcacgtgaataacagtta
cgagtgcgacatccctatcggcgccggcatctgtgccagctaccagacccagacaaacagccctgggt
ctgcttcctctgtagctagccagagcatcatcgcctacaccatgagcctgggcgcagagaacagcgtg
gcctattccaacaactctatcgccattcccaccaactttacaattagcgtcacaacagagatcctgcc
cgtgagcatgaccaagaccagcgtggactgtacaatgtacatctgtggcgacagcactgaatgcagca
acctgctgctgcaatacggctccttttgcacccaactgaaccgggcgctgaccggaatcgccgtggaa
caggacaaaaatacccaggaggtgttcgcccaagtgaagcagatctacaagaccccacctatcaagga
cttcggcggctttaactttagccagattctccctgatccttctaagcctagcaagcggagccctatcg
aggatctgctgttcaacaaggtcaccctggccgatgccggctttatcaaacagtatggcgattgcctg
ggcgacatagccgccagagatctgatctgcgcccagaaattcaacggcctgacagttctcccacctct
gctgaccgacgagatgatcgctcagtacacctctgccctgctggctggcaccatcacatctgggtgga
catttggcgccggccccgccctgcagatcccctttcccatgcagatggcctatagattcaacggaatc
ggcgtgacccagaacgtgctgtatgaaaaccagaagctgatcgctaaccagttcaattctgccatcgg
caagatccaggactccctctcctctacccccagcgccctgggcaaactgcaggacgtggtgaatcaga
acgcccaagccctgaacaccctggtgaagcagctcagcagcaattttggcgccatcagctctgtgctg
aacgatatcctgtctagactggaccctccagaagccgaagtccagatcgatagactgatcacaggcag
actgcagtccctgcaaacctacgtgacccaacagctgatcagggccgctgaaataagagccagcgcca
atctcgccgctaccaagatgtccgagtgtgtgctgggacagtctaaacgcgttgacttctgcggcaaa
ggctatcacctgatgagcttcccccagagcgcgccgcacggcgtggtgttcctgcatgtgacatacgt
gcctgcccaagagaagaatttcacaaccgcccctgccatctgccacgacggcaaggcccacttcccaa
gagagggcgttttcgtttccaatggcacacactggttcgtgacacaaagaaacttctacgaaccccag
attatcaccaccgacaacaccttcgtgagtggcaattgtgacgtggtcatcggaatcgtgaacaacac
agtgtacgaccctctgcaacctgagctggactcttttaaggaagagctggacaagtactttaaaaacc
acaccagccccgatgtggacctgggcgacatcagtggcattaacgccagcgtggtgaacatccaaaag
gaaatcgacagactgaacgaggtggccaagaacctgaacgagtccctgatcgacctgcaggagctcgg
caaatacgagcagTACATCAAGTGGCCATGGTACATCTGGCTGGGCTTCATTGCTGGACTGATTGCCA
TTGTGATGGTGACCATAATGCTGTGTTGTATGACCTCCTGTTGTTCCTGTCTGAAAGGCTGTTGTTCC
TGTGGCTCCTGTTGTAAGTTTGATGAGGATGACTCTGAACCTGTGCTGAAAGGAGTGAAACTGCACTA
CACCTGActcgagcgataattcactcctcaggtgcaggctgcctatcagaaggtggtggctggtgtgg
ccaatgccctggctcacaaataccactgagatctttttccctctgccaaaaattatggggacatcatg
aagccccttgagcatctgacttctggctaataaaggaaatttattttcattgcaatagtgtgttggaa
ttttttgtgtctctcactcggaaggacatatgggagggcaaatcatttaaaacatcagaatgagtatt
tggtttagagtttggcaacatatgccatatgctggctgccatgaacaaaggtggctataaagaggtca
tcagtatatgaaacagccccctgctgtccattccttattccatagaaaagccttgacttgaggttaga
ttttttttatattttgttttgtgttatttttttctttaacatccctaaaattttccttacatgtttta
ctagccagatttttcctcctctcctgactactcccagtcatagctgtccctcttctcttatgaagatc
cctcgacctgcagcccaagcttggcgtaatcatggtcatagctgtttcctgtgtgaaattgttatccg
ctcacaattccacacaacatacgagccggaagcataaagtgtaaagcctggggtgcctaatgagtgag
ctaactcacattaattgcgttgcgctcactgcccgctttccagtcgggaaacctgtcgtgccagcgga
tcgatccgctgcattaatgaatcggccaacgcgcggggagaggcggtttgcgtattgggcgctcttcc
gcttcctcgctcactgactcgctgcgctcggtcgttcggctgcggcgagcggtatcagctcactcaaa
ggcggtaatacggttatccacagaatcaggggataacgcaggaaagaacatgtgagcaaaaggccagc
aaaaggccaggaaccgtaaaaaggccgcgttgctggcgtttttccataggctccgcccccctgacgag
catcacaaaaatcgacgctcaagtcagaggtggcgaaacccgacaggactataaagataccaggcgtt
tccccctggaagctccctcgtgcgctctcctgttccgaccctgccgcttaccggatacctgtccgcct
ttctcccttcgggaagcgtggcgctttctcaatgctcacgctgtaggtatctcagttcggtgtaggtc
gttcgctccaagctgggctgtgtgcacgaaccccccgttcagcccgaccgctgcgccttatccggtaa
ctatcgtcttgagtccaacccggtaagacacgacttatcgccactggcagcagccactggtaacagga
ttagcagagcgaggtatgtaggcggtgctacagagttcttgaagtggtggcctaactacggctacact
agaaggacagtatttggtatctgcgctctgctgaagccagttaccttcggaaaaagagttggtagctc
ttgatccggcaaacaaaccaccgctggtagcggtggtttttttgtttgcaagcagcagattacgcgca
gaaaaaaaggatctcaagaagatcctttgatcttttctacggggtctgacgctcagtggaacgaaaac
tcacgttaagggattttggtcatgagattatcaaaaaggatcttcacctagatccttttaaattaaaa
atgaagttttaaatcaatctaaagtatatatgagtaaacttggtctgacagttaccaatgcttaatca
gtgaggcacctatctcagcgatctgtctatttcgttcatccatagttgcctgactccccgtcgtgtag
ataactacgatacgggagggcttaccatctggccccagtgctgcaatgataccgcgagacccacgctc
accggctccagatttatcagcaataaaccagccagccggaagggccgagcgcagaagtggtcctgcaa
ctttatccgcctccatccagtctattaattgttgccgggaagctagagtaagtagttcgccagttaat
agtttgcgcaacgttgttgccattgctacaggcatcgtggtgtcacgctcgtcgtttggtatggcttc
attcagctccggttcccaacgatcaaggcgagttacatgatcccccatgttgtgcaaaaaagcggtta
gctccttcggtcctccgatcgttgtcagaagtaagttggccgcagtgttatcactcatggttatggca
gcactgcataattctcttactgtcatgccatccgtaagatgcttttctgtgactggtgagtactcaac
caagtcattctgagaatagtgtatgcggcgaccgagttgctcttgcccggcgtcaatacgggataata
ccgcgccacatagcagaactttaaaagtgctcatcattggaaaacgttcttcggggcgaaaactctca
aggatcttaccgctgttgagatccagttcgatgtaacccactcgtgcacccaactgatcttcagcatc
ttttactttcaccagcgtttctgggtgagcaaaaacaggaaggcaaaatgccgcaaaaaagggaataa
gggcgacacggaaatgttgaatactcatactcttcctttttcaatattattgaagcatttatcagggt
tattgtctcatgagcggatacatatttgaatgtatttagaaaaataaacaaataggggttccgcgcac
atttccccgaaaagtgccacctg
pAZ51-SARS-CoV-2 HexaPro(ECD)-HA(TM CT)-2A-M1(H5N1)-a
SEQ ID NO: 71
gtcgacattgattattgactagttattaatagtaatcaattacggggtcattagttcatagcccatat
atggagttccgcgttacataacttacggtaaatggcccgcctggctgaccgcccaacgacccccgccc
attgacgtcaataatgacgtatgttcccatagtaacgccaatagggactttccattgacgtcaatggg
tggactatttacggtaaactgcccacttggcagtacatcaagtgtatcatatgccaagtacgccccct
attgacgtcaatgacggtaaatggcccgcctggcattatgcccagtacatgaccttatgggactttcc
tacttggcagtacatctacgtattagtcatcgctattaccatgggtcgaggtgagccccacgttctgc
ttcactctccccatctcccccccctccccacccccaattttgtatttatttattttttaattattttg
tgcagcgatgggggcggggggggggggggcgcgcgccaggcggggcggggcggggcgaggggcggggc
ggggcgaggcggagaggtgcggcggcagccaatcagagcggcgcgctccgaaagtttccttttatggc
gaggcggcggcggcggcggccctataaaaagcgaagcgcgcggcgggcgggagtcgctgcgttgcctt
cgccccgtgccccgctccgcgccgcctcgcgccgcccgccccggctctgactgaccgcgttactccca
caggtgagcgggcgggacggcccttctcctccgggctgtaattagcgcttggtttaatgacggctcgt
ttcttttctgtggctgcgtgaaagccttaaagggctccgggagggccctttgtgcgggggggagcggc
tcggggggtgcgtgcgtgtgtgtgtgcgtggggagcgccgcgtgcggcccgcgctgcccggcggctgt
gagcgctgcgggcgcggcgcggggctttgtgcgctccgcgtgtgcgcgaggggagcgcggccgggggc
ggtgccccgcggtgcgggggggctgcgaggggaacaaaggctgcgtgcggggtgtgtgcgtggggggg
tgagcagggggtgtgggcgcggcggtcgggctgtaacccccccctgcacccccctccccgagttgctg
agcacggcccggcttcgggtgcggggctccgtgcggggcgtggcgcggggctcgccgtgccgggcggg
gggtggcggcaggtgggggtgccgggcggggcggggccgcctcgggccggggagggctcgggggaggg
gcgcggcggcccccggagcgccggcggctgtcgaggcgcggcgagccgcagccattgccttttatggt
aatcgtgcgagagggcgcagggacttcctttgtcccaaatctgtgcggagccgaaatctgggaggcgc
cgccgcaccccctctagcgggcgcggggcgaagcggtgcggcgccggcaggaaggaaatgggcgggga
gggccttcgtgcgtcgccgcgccgccgtccccttctccctctccagcctcggggctgtccgcgggggg
acggctgccttcgggggggacggggcagggcggggttcggcttctggcgtgtgaccggcggctctagc
gcctctgctaaccatgttcatgccttcttctttttcctacagctcctgggcaacgtgctggttgttgt
gctgtctcatcattttggcaaagaattgcggccgtctcaggccgagttcggtaccgccaccatgttcg
tgttcctggtgctcctgcctctggtgagcagccagtgcgtgaacctgaccacccgaacccagctccca
ccagcctacaccaacagctttacacggggcgtgtactaccctgacaaggtgttcagatctagcgtcct
gcacagcactcaggacctcttcctgccgttcttcagcaacgtgacatggttccacgccatccacgtga
gcggcacaaacggaaccaagcggtttgataaccccgtcctgccattcaatgatggagtttacttcgcc
agtaccgagaagagtaacatcatccggggctggatcttcggcaccaccctggatagcaaaacacagag
cctcctgatcgtgaacaatgccacgaacgtcgtgatcaaggtgtgcgagttccagttttgcaatgatc
ctttcctgggtgtgtactaccacaagaacaacaagagctggatggaaagcgagttcagagtctacagc
agcgccaacaactgcacattcgagtacgtctctcagccttttctgatggaccttgaggggaaacaagg
caacttcaagaacctgagagaattcgtgttcaagaacatcgacggctacttcaaaatctactccaagc
acacacccatcaacctggtccgggacctccctcagggcttcagcgccctggaacccctggtcgacctg
cccataggcatcaacataacgcggttccaaaccctgctggccctgcatagatcctacctgactcctgg
cgacagcagcagcggatggaccgccggagctgcagcctactatgtgggctacctgcaacctagaacct
tcctgctgaagtacaacgagaacggcacaatcacagacgccgtcgactgcgccctggaccctctctct
gagacaaagtgcaccctgaagtccttcaccgtggaaaagggcatctaccagaccagcaacttccgggt
gcagcctacagagagcatcgtgcgatttccaaacattaccaacctctgccccttcggcgaggtgttta
acgccacaagatttgcctccgtttacgcctggaatagaaagagaatcagcaattgtgtggccgactac
tccgtgctgtataacagcgcctctttcagcaccttcaagtgctacggcgtttccccaacaaagctgaa
tgacctgtgcttcaccaacgtgtacgccgactccttcgtaattagaggcgatgaggtgcggcagatcg
caccaggccagaccggtaagatcgctgactacaactataagctgcctgatgattttacaggctgcgtg
atcgcctggaactctaacaacctggatagcaaggtgggcggcaactacaactacctgtaccggctgtt
tcgcaagtctaacctgaaacctttcgagagagacatctccacagagatctaccaggccggttctacac
cttgtaacggggtggaaggcttcaactgttacttccctctgcaaagctacggcttccagcctaccaat
ggagtcggctaccagccataccgggtggtcgtgctgtccttcgagttactccacgcccccgccaccgt
ctgcggtcctaagaagtccaccaatctggttaagaacaaatgcgtgaacttcaacttcaacggcctga
ccgggaccggcgtgctgaccgaaagcaacaaaaagttcctccccttccagcagttcggccgtgatatc
gctgacaccacagatgccgtcagagatccacagaccctggaaatcctggatattacaccctgctcctt
cggaggagtttctgtgatcacccccgggaccaataccagcaaccaggtggctgtgctgtaccaagatg
ttaactgcaccgaggttcctgtggccatccacgccgatcagctgacacctacttggagagtgtactcc
actggctccaatgtgttccagaccagggccggatgtctgatcggcgccgagcacgtgaataacagtta
cgagtgcgacatccctatcggcgccggcatctgtgccagctaccagacccagacaaacagccctgggt
ctgcttcctctgtagctagccagagcatcatcgcctacaccatgagcctgggcgcagagaacagcgtg
gcctattccaacaactctatcgccattcccaccaactttacaattagcgtcacaacagagatcctgcc
cgtgagcatgaccaagaccagcgtggactgtacaatgtacatctgtggcgacagcactgaatgcagca
acctgctgctgcaatacggctccttttgcacccaactgaaccgggcgctgaccggaatcgccgtggaa
caggacaaaaatacccaggaggtgttcgcccaagtgaagcagatctacaagaccccacctatcaagga
cttcggcggctttaactttagccagattctccctgatccttctaagcctagcaagcggagccctatcg
aggatctgctgttcaacaaggtcaccctggccgatgccggctttatcaaacagtatggcgattgcctg
ggcgacatagccgccagagatctgatctgcgcccagaaattcaacggcctgacagttctcccacctct
gctgaccgacgagatgatcgctcagtacacctctgccctgctggctggcaccatcacatctgggtgga
catttggcgccggccccgccctgcagatcccctttcccatgcagatggcctatagattcaacggaatc
ggcgtgacccagaacgtgctgtatgaaaaccagaagctgatcgctaaccagttcaattctgccatcgg
caagatccaggactccctctcctctacccccagcgccctgggcaaactgcaggacgtggtgaatcaga
acgcccaagccctgaacaccctggtgaagcagctcagcagcaattttggcgccatcagctctgtgctg
aacgatatcctgtctagactggaccctccagaagccgaagtccagatcgatagactgatcacaggcag
actgcagtccctgcaaacctacgtgacccaacagctgatcagggccgctgaaataagagccagcgcca
atctcgccgctaccaagatgtccgagtgtgtgctgggacagtctaaacgcgttgacttctgcggcaaa
ggctatcacctgatgagcttcccccagagcgcgccgcacggcgtggtgttcctgcatgtgacatacgt
gcctgcccaagagaagaatttcacaaccgcccctgccatctgccacgacggcaaggcccacttcccaa
gagagggcgttttcgtttccaatggcacacactggttcgtgacacaaagaaacttctacgaaccccag
attatcaccaccgacaacaccttcgtgagtggcaattgtgacgtggtcatcggaatcgtgaacaacac
agtgtacgaccctctgcaacctgagctggactcttttaaggaagagctggacaagtactttaaaaacc
acaccagccccgatgtggacctgggcgacatcagtggcattaacgccagcgtggtgaacatccaaaag
gaaatcgacagactgaacgaggtggccaagaacctgaacgagtccctgatcgacctgcaggagctcgg
caaatacgagcagTACATCAAGTGGCCACAAATACTGTCAATTTATTCAACAGTGGCGAGTTCCCTAG
CACTGGCAATCATGATGGCTGGTCTATCTTTATGGATGTGCTCCAATGGATCGTTACAATGCAGAATT
TGCATTgagggcagaggaagtctgctaacatgcggtgacgtcgaggagaatcctggcccaATGAGTCT
TCTAACCGAGGTCGAAACGTACGTTCTCTCTATCATCCCGTCAGGCCCCCTCAAAGCCGAGATCGCGC
AGAAACTTGAAGATGTCTTTGCAGGAAAGAACACCGATCTCGAGGCTCTCATGGAGTGGCTGAAGACA
AGACCAATCCTGTCACCTCTGACTAAAGGGATTTTGGGATTTGTATTCACGCTCACCGTGCCCAGTGA
GCGAGGACTGCAGCGTAGACGCTTTGTCCAGAATGCCCTAAATGGAAATGGAGATCCAAATAATATGG
ATAGGGCAGTTAAGCTATATAAGAAGCTGAAAAGAGAAATAACATTCCATGGGGCTAAAGAGGTTTCA
CTCAGCTACTCAACCGGTGCACTTGCCAGTTGCATGGGTCTCATATACAACAGGATGGGAACGGTGAC
TACGGAAGTGGCTTTTGGCCTAGTGTGTGCCACTTGTGAGCAGATTGCAGATTCACAGCATCGGTCTC
ACAGGCAGATGGCAACTATCACCAACCCACTAATCAGGCATGAAAACAGAATGGTGCTGGCCAGCACT
ACAGCTAAGGCTATGGAGCAGATGGCGGGATCAAGTGAGCAGGCAGCGGAAGCCATGGAGGTCGCTAA
TCAGGCTAGGCAGATGGTGCAGGCAATGAGGACAATTGGAACTCATCCTAACTCTAGTGCTGGTCTGA
GAGATAATCTTCTTGAAAATTTGCAGGCCTACCAGAAACGAATGGGAGTGCAGATGCAGCGATTCAAG
TGActcgagcgataattcactcctcaggtgcaggctgcctatcagaaggtggtggctggtgtggccaa
tgccctggctcacaaataccactgagatctttttccctctgccaaaaattatggggacatcatgaagc
cccttgagcatctgacttctggctaataaaggaaatttattttcattgcaatagtgtgttggaatttt
ttgtgtctctcactcggaaggacatatgggagggcaaatcatttaaaacatcagaatgagtatttggt
ttagagtttggcaacatatgccatatgctggctgccatgaacaaaggtggctataaagaggtcatcag
tatatgaaacagccccctgctgtccattccttattccatagaaaagccttgacttgaggttagatttt
ttttatattttgttttgtgttatttttttctttaacatccctaaaattttccttacatgttttactag
ccagatttttcctcctctcctgactactcccagtcatagctgtccctcttctcttatgaagatccctc
gacctgcagcccaagcttggcgtaatcatggtcatagctgtttcctgtgtgaaattgttatccgctca
caattccacacaacatacgagccggaagcataaagtgtaaagcctggggtgcctaatgagtgagctaa
ctcacattaattgcgttgcgctcactgcccgctttccagtcgggaaacctgtcgtgccagcggatcga
tccgctgcattaatgaatcggccaacgcgcggggagaggcggtttgcgtattgggcgctcttccgctt
cctcgctcactgactcgctgcgctcggtcgttcggctgcggcgagcggtatcagctcactcaaaggcg
gtaatacggttatccacagaatcaggggataacgcaggaaagaacatgtgagcaaaaggccagcaaaa
ggccaggaaccgtaaaaaggccgcgttgctggcgtttttccataggctccgcccccctgacgagcatc
acaaaaatcgacgctcaagtcagaggtggcgaaacccgacaggactataaagataccaggcgtttccc
cctggaagctccctcgtgcgctctcctgttccgaccctgccgcttaccggatacctgtccgcctttct
cccttcgggaagcgtggcgctttctcaatgctcacgctgtaggtatctcagttcggtgtaggtcgttc
gctccaagctgggctgtgtgcacgaaccccccgttcagcccgaccgctgcgccttatccggtaactat
cgtcttgagtccaacccggtaagacacgacttatcgccactggcagcagccactggtaacaggattag
cagagcgaggtatgtaggcggtgctacagagttcttgaagtggtggcctaactacggctacactagaa
ggacagtatttggtatctgcgctctgctgaagccagttaccttcggaaaaagagttggtagctcttga
tccggcaaacaaaccaccgctggtagcggtggtttttttgtttgcaagcagcagattacgcgcagaaa
aaaaggatctcaagaagatcctttgatcttttctacggggtctgacgctcagtggaacgaaaactcac
gttaagggattttggtcatgagattatcaaaaaggatcttcacctagatccttttaaattaaaaatga
agttttaaatcaatctaaagtatatatgagtaaacttggtctgacagttaccaatgcttaatcagtga
ggcacctatctcagcgatctgtctatttcgttcatccatagttgcctgactccccgtcgtgtagataa
ctacgatacgggagggcttaccatctggccccagtgctgcaatgataccgcgagacccacgctcaccg
gctccagatttatcagcaataaaccagccagccggaagggccgagcgcagaagtggtcctgcaacttt
atccgcctccatccagtctattaattgttgccgggaagctagagtaagtagttcgccagttaatagtt
tgcgcaacgttgttgccattgctacaggcatcgtggtgtcacgctcgtcgtttggtatggcttcattc
agctccggttcccaacgatcaaggcgagttacatgatcccccatgttgtgcaaaaaagcggttagctc
cttcggtcctccgatcgttgtcagaagtaagttggccgcagtgttatcactcatggttatggcagcac
tgcataattctcttactgtcatgccatccgtaagatgcttttctgtgactggtgagtactcaaccaag
tcattctgagaatagtgtatgcggcgaccgagttgctcttgcccggcgtcaatacgggataataccgc
gccacatagcagaactttaaaagtgctcatcattggaaaacgttcttcggggcgaaaactctcaagga
tcttaccgctgttgagatccagttcgatgtaacccactcgtgcacccaactgatcttcagcatctttt
actttcaccagcgtttctgggtgagcaaaaacaggaaggcaaaatgccgcaaaaaagggaataagggc
gacacggaaatgttgaatactcatactcttcctttttcaatattattgaagcatttatcagggttatt
gtctcatgagcggatacatatttgaatgtatttagaaaaataaacaaataggggttccgcgcacattt
ccccgaaaagtgccacctg
pAZ52-pcDNA3-CMV-mCCL28-a
SEQ ID NO: 72
gtcgacattgattattgactagttattaatagtaatcaattacggggtcattagttcatagcccatat
atggagttccgcgttacataacttacggtaaatggcccgcctggctgaccgcccaacgacccccgccc
attgacgtcaataatgacgtatgttcccatagtaacgccaatagggactttccattgacgtcaatggg
tggactatttacggtaaactgcccacttggcagtacatcaagtgtatcatatgccaagtacgccccct
attgacgtcaatgacggtaaatggcccgcctggcattatgcccagtacatgaccttatgggactttcc
tacttggcagtacatctacgtattagtcatcgctattaccatgggtcgaggtgagccccacgttctgc
ttcactctccccatctcccccccctccccacccccaattttgtatttatttattttttaattattttg
tgcagcgatgggggcggggggggggggggcgcgcgccaggcggggcggggcggggcgaggggcggggc
ggggcgaggcggagaggtgcggcggcagccaatcagagcggcgcgctccgaaagtttccttttatggc
gaggcggcggcggcggcggccctataaaaagcgaagcgcgcggcgggcgggagtcgctgcgttgcctt
cgccccgtgccccgctccgcgccgcctcgcgccgcccgccccggctctgactgaccgcgttactccca
caggtgagcgggcgggacggcccttctcctccgggctgtaattagcgcttggtttaatgacggctcgt
ttcttttctgtggctgcgtgaaagccttaaagggctccgggagggccctttgtgcgggggggagcggc
tcggggggtgcgtgcgtgtgtgtgtgcgtggggagcgccgcgtgcggcccgcgctgcccggcggctgt
gagcgctgcgggcgcggcgcggggctttgtgcgctccgcgtgtgcgcgaggggagcgcggccgggggc
ggtgccccgcggtgcgggggggctgcgaggggaacaaaggctgcgtgcggggtgtgtgcgtggggggg
tgagcagggggtgtgggcgcggcggtcgggctgtaacccccccctgcacccccctccccgagttgctg
agcacggcccggcttcgggtgcggggctccgtgcggggcgtggcgcggggctcgccgtgccgggcggg
gggtggcggcaggtgggggtgccgggcggggcggggccgcctcgggccggggagggctcgggggaggg
gcgcggcggcccccggagcgccggcggctgtcgaggcgcggcgagccgcagccattgccttttatggt
aatcgtgcgagagggcgcagggacttcctttgtcccaaatctgtgcggagccgaaatctgggaggcgc
cgccgcaccccctctagcgggcgcggggcgaagcggtgcggcgccggcaggaaggaaatgggcgggga
gggccttcgtgcgtcgccgcgccgccgtccccttctccctctccagcctcggggctgtccgcgggggg
acggctgccttcgggggggacggggcagggcggggttcggcttctggcgtgtgaccggcggctctagc
gcctctgctaaccatgttcatgccttcttctttttcctacagctcctgggcaacgtgctggttgttgt
gctgtctcatcattttggcaaagaattgcggccgtctcaggccgagttcggtaccgccaccATGCAGC
AAGCAGGGCTCACACTCATGGCTGTGGCTGTGTGTGTGGCTTTTCAAACCTCAGAAGCCATACTTCCC
ATGGCCTCCAGCTGTTGCACTGAGGTGTCTCATCATGTTTCCGGAAGACTTCTGGAAAGAGTGAGTTC
ATGCAGCATCCAGAGAGCTGACGGGGACTGCGACCTGGCTGCTGTCATCCTTCATGTTAAACGTAGAA
GAATCTGCATCAGCCCGCACAATCGTACTTTGAAGCAGTGGATGAGAGCCTCAGAGGTAAAGAAGAAT
GGCAGAGAAAACGTATGTTCTGGGAAAAAACAACCCAGCAGGAAGGACAGAAAAGGGCACACTACGAG
AAAGCACAGAACACGTGGAACACACAGGCACGAAGCCTCTCGTTAGctcgagcgataattcactcctc
aggtgcaggctgcctatcagaaggtggtggctggtgtggccaatgccctggctcacaaataccactga
gatctttttccctctgccaaaaattatggggacatcatgaagccccttgagcatctgacttctggcta
ataaaggaaatttattttcattgcaatagtgtgttggaattttttgtgtctctcactcggaaggacat
atgggagggcaaatcatttaaaacatcagaatgagtatttggtttagagtttggcaacatatgccata
tgctggctgccatgaacaaaggtggctataaagaggtcatcagtatatgaaacagccccctgctgtcc
attccttattccatagaaaagccttgacttgaggttagattttttttatattttgttttgtgttattt
ttttctttaacatccctaaaattttccttacatgttttactagccagatttttcctcctctcctgact
actcccagtcatagctgtccctcttctcttatgaagatccctcgacctgcagcccaagcttggcgtaa
tcatggtcatagctgtttcctgtgtgaaattgttatccgctcacaattccacacaacatacgagccgg
aagcataaagtgtaaagcctggggtgcctaatgagtgagctaactcacattaattgcgttgcgctcac
tgcccgctttccagtcgggaaacctgtcgtgccagcggatcgatccgctgcattaatgaatcggccaa
cgcgcggggagaggcggtttgcgtattgggcgctcttccgcttcctcgctcactgactcgctgcgctc
ggtcgttcggctgcggcgagcggtatcagctcactcaaaggcggtaatacggttatccacagaatcag
gggataacgcaggaaagaacatgtgagcaaaaggccagcaaaaggccaggaaccgtaaaaaggccgcg
ttgctggcgtttttccataggctccgcccccctgacgagcatcacaaaaatcgacgctcaagtcagag
gtggcgaaacccgacaggactataaagataccaggcgtttccccctggaagctccctcgtgcgctctc
ctgttccgaccctgccgcttaccggatacctgtccgcctttctcccttcgggaagcgtggcgctttct
caatgctcacgctgtaggtatctcagttcggtgtaggtcgttcgctccaagctgggctgtgtgcacga
accccccgttcagcccgaccgctgcgccttatccggtaactatcgtcttgagtccaacccggtaagac
acgacttatcgccactggcagcagccactggtaacaggattagcagagcgaggtatgtaggcggtgct
acagagttcttgaagtggtggcctaactacggctacactagaaggacagtatttggtatctgcgctct
gctgaagccagttaccttcggaaaaagagttggtagctcttgatccggcaaacaaaccaccgctggta
gcggtggtttttttgtttgcaagcagcagattacgcgcagaaaaaaaggatctcaagaagatcctttg
atcttttctacggggtctgacgctcagtggaacgaaaactcacgttaagggattttggtcatgagatt
atcaaaaaggatcttcacctagatccttttaaattaaaaatgaagttttaaatcaatctaaagtatat
atgagtaaacttggtctgacagttaccaatgcttaatcagtgaggcacctatctcagcgatctgtcta
tttcgttcatccatagttgcctgactccccgtcgtgtagataactacgatacgggagggcttaccatc
tggccccagtgctgcaatgataccgcgagacccacgctcaccggctccagatttatcagcaataaacc
agccagccggaagggccgagcgcagaagtggtcctgcaactttatccgcctccatccagtctattaat
tgttgccgggaagctagagtaagtagttcgccagttaatagtttgcgcaacgttgttgccattgctac
aggcatcgtggtgtcacgctcgtcgtttggtatggcttcattcagctccggttcccaacgatcaaggc
gagttacatgatcccccatgttgtgcaaaaaagcggttagctccttcggtcctccgatcgttgtcaga
agtaagttggccgcagtgttatcactcatggttatggcagcactgcataattctcttactgtcatgcc
atccgtaagatgcttttctgtgactggtgagtactcaaccaagtcattctgagaatagtgtatgcggc
gaccgagttgctcttgcccggcgtcaatacgggataataccgcgccacatagcagaactttaaaagtg
ctcatcattggaaaacgttcttcggggcgaaaactctcaaggatcttaccgctgttgagatccagttc
gatgtaacccactcgtgcacccaactgatcttcagcatcttttactttcaccagcgtttctgggtgag
caaaaacaggaaggcaaaatgccgcaaaaaagggaataagggcgacacggaaatgttgaatactcata
ctcttcctttttcaatattattgaagcatttatcagggttattgtctcatgagcggatacatatttga
atgtatttagaaaaataaacaaataggggttccgcgcacatttccccgaaaagtgccacctg
pJP61-AAV-EF1a-minigenes-v1-WPRE-codonoptimized
SEQ ID NO: 73
ctgcgcgctcgctcgctcactgaggccgcccgggcaaagcccgggcgtcgggcgacctttggtcgccc
ggcctcagtgagcgagcgagcgcgcagagagggagtggccaactccatcactaggggttccttgtagt
taatgattaacccgccatgctacttatctaccagggtaatggggatcctctagaactatagctagaat
tctagtggatccccccgcgccggctccggtgcccgtcagtgggcagagcgcacatcgcccacagtccc
cgagaagttggggggaggggtcggcaattgaaccggtgcctagagaaggtggcgcggggtaaactggg
aaagtgatgtcgtgtactggctccgcctttttcccgagggtgggggagaaccgtatataagtgcagta
gtcgccgtgaacgttctttttcgcaacgggtttgccgccagaacacaggtaagtgccgtgtgtggttc
ccgcgggcctggcctctttacgggttatggcccttgcgtgccttgaattacttccacctggctgcagt
acgtgattcttgatcccgagcttcgggttggaagtgggtgggagagttcgaggccttgcgcttaagga
gccccttcgcctcgtgcttgagttgaggcctggcctgggcgctggggccgccgcgtgcgaatctggtg
gcaccttcgcgcctgtctcgctgctttcgataagtctctagccatttaaaatttttgatgacctgctg
cgacgctttttttctggcaagatagtcttgtaaatgcgggccaagatctgcacactggtatttcggtt
tttggggccgcgggcggcgacggggcccgtgcgtcccagcgcacatgttcggcgaggcggggcctgcg
agcgcggccaccgagaatcggacgggggtagtctcaagctggccggcctgctctggtgcctggcctcg
cgccgccgtgtatcgccccgccctgggcggcaaggctggcccggtcggcaccagttgcgtgagcggaa
agatggccgcttcccggccctgctgcagggagctcaaaatggaggacgcggcgctcgggagagcgggc
gggtgagtcacccacacaaaggaaaagggcctttccgtcctcagccgtcgcttcatgtgactccacgg
agtaccgggcgccgtccaggcacctcgattagttctcgagcttttggagtacgtcgtctttaggttgg
ggggaggggttttatgcgatggagtttccccacactgagtgggtggagactgaagttaggccagcttg
gcacttgatgtaattctccttggaatttgccctttttgagtttggatcttggttcattctcaagcctc
agacagtggttcaaagtttttttcttccatttcaggtgtcgtgagctagagctttattgcggtagttt
atcacagttaaattgctaacgcagtcagtgcttctgacacaacagtctcgaacttaagctgcagaagt
tggtcgtgaggcactgggcaggtaagtatcaaggttacaagacaggtttaaggagaccaatagaaact
gggcttgtcgagacagagaagactcttgcgtttctgataggcacctattggtcttactgacatccact
ttgcctttctctccacaggtgtccactcccagttcaattacagctcttaaggctagagtacttaatac
gactcactataggctagcctcgagaattgtacaattcacgcgggccgccATGGTGAACTGTACTGAAG
TACCCGTTGCCATTCACGCAGATCAACTTACCCCTACCTGGCGCGTCTATTCCACAGGGAGTAATGTC
TTTCAGACCGCAGCATATAATGGGACAATAACCGTTGAGGAATTGAAAAAACTGTTGGAACAGGCTGC
ATACTATGTGTACTCTCGAGTCAAGAACCTGAACAGTAGCAGGGTCCCAGACCTGCTCGTCGCCGCAT
ACAACGGGCCTCAGAATCAGAGAAACGCCCCCAGAATAACCTTTGGGGGACCCTCCGATTCAACAGGC
AGCAATCAAAACGGAGAGCGGAGCGGCGCAAGGTCCAAACAGAGGCGGCCCCAAGGACTTCCTAACAA
TGCTGCCTACTATCAAACACAGACAAATTCACCTCGCCGGGCACGGTCAGTAGCTTCACAGTCTATTA
TAGCATACACTATGAGTTTGGGGGCTGAAAATAGTGTGGCCTACTCTAATAACAGTATCGCTGCTTAT
GAAGTACGGCAAATAGCTCCCGGACAAACAGGGAAGATTGCTGATTACAATTATAAGGCTGCCTATAA
ACTTGGAGCATCCCAACGGGTTGCCGGAGATTCAGGATTCGCAGCATATTCCAGATATAGAATCGGAA
ACTATAAAGCCGCCTACGACGCCTACAAAACCTTCCCACCCACCGAGCCAAAAAAGGACAAGAAAAAG
AAGGCTGATGAAACCCAGGCTTTGCCACAAAGGCAGAAGAAGCAGCAGACAGTAACCCTCCTCGCCGC
ATATGGAAAACAGGGCAATTTCAAAAATTTGAGGGAATTTGTCTTTAAGAATATAGACGGATATTTCA
AGATCTATTCTAAACATGCCGCCTACCACCACCATCATCACCATTAGtaagctcgcgtgatcaagctt
atcgataatcaacctctggattacaaaatttgtgaaagattgactggtattcttaactatgttgctcc
ttttacgctatgtggatacgctgctttaatgcctttgtatcatgctattgcttcccgtatggctttca
ttttctcctccttgtataaatcctggttgctgtctctttatgaggagttgtggcccgttgtcaggcaa
cgtggcgtggtgtgcactgtgtttgctgacgcaacccccactggttggggcattgccaccacctgtca
gctcctttccgggactttcgctttccccctccctattgccacggcggaactcatcgccgcctgccttg
cccgctgctggacaggggctcggctgttgggcactgacaattccgtggtgttgtcggggaaatcatcg
tcctttccttggctgctcgcctgtgttgccacctggattctgcgcgggacgtccttctgctacgtccc
ttcggccctcaatccagcggaccttccttcccgcggcctgctgccggctctgcggcctcttccgcgtc
ttcgccttcgccctcagacgagtcggatctccctttgggccgcctccccgcatcgataccgtcgaccc
gggcggcctcgaggacggggtgaactacgcctgaggatccgatctttttccctctgccaaaaattatg
gggacatcatgaagccccttgagcatctgacttctggctaataaaggaaatttattttcattgcaata
gtgtgttggaattttttgtgtctctcactcggaagcaattcgttgatctgaatttcgaccacccataa
tacccattaccctggtagataagtagcatggcgggttaatcattaactacaaggaacccctagtgatg
gagttggccactccctctctgcgcgctcgctcgctcactgaggccgggcgaccaaaggtcgcccgacg
cccgggctttgcccgggcggcctcagtgagcgagcgagcgcgcagccttaattaacctaattcactgg
ccgtcgttttacaacgtcgtgactgggaaaaccctggcgttacccaacttaatcgccttgcagcacat
ccccctttcgccagctggcgtaatagcgaagaggcccgcaccgatcgcccttcccaacagttgcgcag
cctgaatggcgaatgggacgcgccctgtagcggcgcattaagcgcggcgggtgtggtggttacgcgca
gcgtgaccgctacacttgccagcgccctagcgcccgctcctttcgctttcttcccttcctttctcgcc
acgttcgccggctttccccgtcaagctctaaatcgggggctccctttagggttccgatttagtgcttt
acggcacctcgaccccaaaaaacttgattagggtgatggttcacgtagtgggccatcgccctgataga
cggtttttcgccctttgacgttggagtccacgttctttaatagtggactcttgttccaaactggaaca
acactcaaccctatctcggtctattcttttgatttataagggattttgccgatttcggcctattggtt
aaaaaatgagctgatttaacaaaaatttaacgcgaattttaacaaaatattaacgcttacaatttagg
tggcacttttcggggaaatgtgcgcggaacccctatttgtttatttttctaaatacattcaaatatgt
atccgctcatgagacaataaccctgataaatgcttcaataatattgaaaaaggaagagtatgagtatt
caacatttccgtgtcgcccttattcccttttttgcggcattttgccttcctgtttttgctcacccaga
aacgctggtgaaagtaaaagatgctgaagatcagttgggtgcacgagtgggttacatcgaactggatc
tcaacagcggtaagatccttgagagttttcgccccgaagaacgttttccaatgatgagcacttttaaa
gttctgctatgtggcgcggtattatcccgtattgacgccgggcaagagcaactcggtcgccgcataca
ctattctcagaatgacttggttgagtactcaccagtcacagaaaagcatcttacggatggcatgacag
taagagaattatgcagtgctgccataaccatgagtgataacactgcggccaacttacttctgacaacg
atcggaggaccgaaggagctaaccgcttttttgcacaacatgggggatcatgtaactcgccttgatcg
ttgggaaccggagctgaatgaagccataccaaacgacgagcgtgacaccacgatgcctgtagcaatgg
caacaacgttgcgcaaactattaactggcgaactacttactctagcttcccggcaacaattaatagac
tggatggaggcggataaagttgcaggaccacttctgcgctcggcccttccggctggctggtttattgc
tgataaatctggagccggtgagcgtgggtctcgcggtatcattgcagcactggggccagatggtaagc
cctcccgtatcgtagttatctacacgacggggagtcaggcaactatggatgaacgaaatagacagatc
gctgagataggtgcctcactgattaagcattggtaactgtcagaccaagtttactcatatatacttta
gattgatttaaaacttcatttttaatttaaaaggatctaggtgaagatcctttttgataatctcatga
ccaaaatcccttaacgtgagttttcgttccactgagcgtcagaccccgtagaaaagatcaaaggatct
tcttgagatcctttttttctgcgcgtaatctgctgcttgcaaacaaaaaaaccaccgctaccagcggt
ggtttgtttgccggatcaagagctaccaactctttttccgaaggtaactggcttcagcagagcgcaga
taccaaatactgttcttctagtgtagccgtagttaggccaccacttcaagaactctgtagcaccgcct
acatacctcgctctgctaatcctgttaccagtggctgctgccagtggcgataagtcgtgtcttaccgg
gttggactcaagacgatagttaccggataaggcgcagcggtcgggctgaacggggggttcgtgcacac
agcccagcttggagcgaacgacctacaccgaactgagatacctacagcgtgagctatgagaaagcgcc
acgcttcccgaagggagaaaggcggacaggtatccggtaagcggcagggtcggaacaggagagcgcac
gagggagcttccagggggaaacgcctggtatctttatagtcctgtcgggtttcgccacctctgacttg
agcgtcgatttttgtgatgctcgtcaggggggcggagcctatggaaaaacgccagcaacgcggccttt
ttacggttcctggccttttgctggccttttgctcacatgttctttcctgcgttatcccctgattctgt
ggataaccgtattaccgcctttgagtgagctgataccgctcgccgcagccgaacgaccgagcgcagcg
agtcagtgagcgaggaagcggaagagcgcccaatacgcaaaccgcctctccccgcgcgttggccgatt
cattaatgcagctggcacgacaggtttcccgactggaaagcgggcagtgagcgcaacgcaattaatgt
gagttagctcactcattaggcaccccaggctttacactttatgcttccggctcgtatgttgtgtggaa
ttgtgagcggataacaatttcacacaggaaacagctatgaccatgattacgccagatttaattaaggc
cttaattagg
pJP62-AAV-EF1a-minigenes-v2-WPRE-codonoptimized
SEQ ID NO: 74
ctgcgcgctcgctcgctcactgaggccgcccgggcaaagcccgggcgtcgggcgacctttggtcgccc
ggcctcagtgagcgagcgagcgcgcagagagggagtggccaactccatcactaggggttccttgtagt
taatgattaacccgccatgctacttatctaccagggtaatggggatcctctagaactatagctagaat
tctagtggatccccccgcgccggctccggtgcccgtcagtgggcagagcgcacatcgcccacagtccc
cgagaagttggggggaggggtcggcaattgaaccggtgcctagagaaggtggcgcggggtaaactggg
aaagtgatgtcgtgtactggctccgcctttttcccgagggtgggggagaaccgtatataagtgcagta
gtcgccgtgaacgttctttttcgcaacgggtttgccgccagaacacaggtaagtgccgtgtgtggttc
ccgcgggcctggcctctttacgggttatggcccttgcgtgccttgaattacttccacctggctgcagt
acgtgattcttgatcccgagcttcgggttggaagtgggtgggagagttcgaggccttgcgcttaagga
gccccttcgcctcgtgcttgagttgaggcctggcctgggcgctggggccgccgcgtgcgaatctggtg
gcaccttcgcgcctgtctcgctgctttcgataagtctctagccatttaaaatttttgatgacctgctg
cgacgctttttttctggcaagatagtcttgtaaatgcgggccaagatctgcacactggtatttcggtt
tttggggccgcgggcggcgacggggcccgtgcgtcccagcgcacatgttcggcgaggcggggcctgcg
agcgcggccaccgagaatcggacgggggtagtctcaagctggccggcctgctctggtgcctggcctcg
cgccgccgtgtatcgccccgccctgggcggcaaggctggcccggtcggcaccagttgcgtgagcggaa
agatggccgcttcccggccctgctgcagggagctcaaaatggaggacgcggcgctcgggagagcgggc
gggtgagtcacccacacaaaggaaaagggcctttccgtcctcagccgtcgcttcatgtgactccacgg
agtaccgggcgccgtccaggcacctcgattagttctcgagcttttggagtacgtcgtctttaggttgg
ggggaggggttttatgcgatggagtttccccacactgagtgggtggagactgaagttaggccagcttg
gcacttgatgtaattctccttggaatttgccctttttgagtttggatcttggttcattctcaagcctc
agacagtggttcaaagtttttttcttccatttcaggtgtcgtgagctagagctttattgcggtagttt
atcacagttaaattgctaacgcagtcagtgcttctgacacaacagtctcgaacttaagctgcagaagt
tggtcgtgaggcactgggcaggtaagtatcaaggttacaagacaggtttaaggagaccaatagaaact
gggcttgtcgagacagagaagactcttgcgtttctgataggcacctattggtcttactgacatccact
ttgcctttctctccacaggtgtccactcccagttcaattacagctcttaaggctagagtacttaatac
gactcactataggctagcctcgagaattgtacaattcacgcgggccgccATGTTTGTTTTTCTCGTTT
TGCTCCCACTGGCAGCATACAACCTGATTGATTCCTATTTCGTAGTAGCAGCCTACCTTCTTCTGGAC
AGGCTCAATCAACTTGCTGCTTACAAATTGCTCGAACAATGGAACCTCGTCGCAGCCTATGTTCTGCT
TTTTCTTGCATTCGTAGTCGCTGCATATCTCCTGAGTGCAGGCATTTTCGGTGCTGCCGCTTATGTGT
TGGCCTGGCTCTATGCAGCCGTTGCTGCATACGCTTTGTGGGAAATCCAACAAGTCGTAGCTGCCTAC
ACCATGGCCGATCTCGTGTACGCCTTGGCCGCATACTTTCTGTGGTTGTTGTGGCCTGTGACAGCTGC
TTATTTTTTGGCATTTGTTGTGTTTTTGCTCGCAGCATATTTTCTTAAAAAGGACGCTCCCTACATAG
CTGCCTACTTCCTGAATAGGTTCACCACCACACTGGCTGCCTATTTGCTCATGCCCATTCTGACTTTG
ACAGCTGCATATAAAATAGCAGATTACAACTATAAGCTCGCTGCTTACTTCACAATCTCCGTAACCAC
TGAGATTGCCGCATATTTTGTGTTGGCTGCTGTTTATCGCATCGCAGCCTATTACCTGGCTACAGCAC
TGCTCACTCTTGCTGCATACCATCATCATCACCATCATTAGtaagctcgcgtgatcaagcttatcgat
aatcaacctctggattacaaaatttgtgaaagattgactggtattcttaactatgttgctccttttac
gctatgtggatacgctgctttaatgcctttgtatcatgctattgcttcccgtatggctttcattttct
cctccttgtataaatcctggttgctgtctctttatgaggagttgtggcccgttgtcaggcaacgtggc
gtggtgtgcactgtgtttgctgacgcaacccccactggttggggcattgccaccacctgtcagctcct
ttccgggactttcgctttccccctccctattgccacggcggaactcatcgccgcctgccttgcccgct
gctggacaggggctcggctgttgggcactgacaattccgtggtgttgtcggggaaatcatcgtccttt
ccttggctgctcgcctgtgttgccacctggattctgcgcgggacgtccttctgctacgtcccttcggc
cctcaatccagcggaccttccttcccgcggcctgctgccggctctgcggcctcttccgcgtcttcgcc
ttcgccctcagacgagtcggatctccctttgggccgcctccccgcatcgataccgtcgacccgggcgg
cctcgaggacggggtgaactacgcctgaggatccgatctttttccctctgccaaaaattatggggaca
tcatgaagccccttgagcatctgacttctggctaataaaggaaatttattttcattgcaatagtgtgt
tggaattttttgtgtctctcactcggaagcaattcgttgatctgaatttcgaccacccataataccca
ttaccctggtagataagtagcatggcgggttaatcattaactacaaggaacccctagtgatggagttg
gccactccctctctgcgcgctcgctcgctcactgaggccgggcgaccaaaggtcgcccgacgcccggg
ctttgcccgggcggcctcagtgagcgagcgagcgcgcagccttaattaacctaattcactggccgtcg
ttttacaacgtcgtgactgggaaaaccctggcgttacccaacttaatcgccttgcagcacatccccct
ttcgccagctggcgtaatagcgaagaggcccgcaccgatcgcccttcccaacagttgcgcagcctgaa
tggcgaatgggacgcgccctgtagcggcgcattaagcgcggcgggtgtggtggttacgcgcagcgtga
ccgctacacttgccagcgccctagcgcccgctcctttcgctttcttcccttcctttctcgccacgttc
gccggctttccccgtcaagctctaaatcgggggctccctttagggttccgatttagtgctttacggca
cctcgaccccaaaaaacttgattagggtgatggttcacgtagtgggccatcgccctgatagacggttt
ttcgccctttgacgttggagtccacgttctttaatagtggactcttgttccaaactggaacaacactc
aaccctatctcggtctattcttttgatttataagggattttgccgatttcggcctattggttaaaaaa
tgagctgatttaacaaaaatttaacgcgaattttaacaaaatattaacgcttacaatttaggtggcac
ttttcggggaaatgtgcgcggaacccctatttgtttatttttctaaatacattcaaatatgtatccgc
tcatgagacaataaccctgataaatgcttcaataatattgaaaaaggaagagtatgagtattcaacat
ttccgtgtcgcccttattcccttttttgcggcattttgccttcctgtttttgctcacccagaaacgct
ggtgaaagtaaaagatgctgaagatcagttgggtgcacgagtgggttacatcgaactggatctcaaca
gcggtaagatccttgagagttttcgccccgaagaacgttttccaatgatgagcacttttaaagttctg
ctatgtggcgcggtattatcccgtattgacgccgggcaagagcaactcggtcgccgcatacactattc
tcagaatgacttggttgagtactcaccagtcacagaaaagcatcttacggatggcatgacagtaagag
aattatgcagtgctgccataaccatgagtgataacactgcggccaacttacttctgacaacgatcgga
ggaccgaaggagctaaccgcttttttgcacaacatgggggatcatgtaactcgccttgatcgttggga
accggagctgaatgaagccataccaaacgacgagcgtgacaccacgatgcctgtagcaatggcaacaa
cgttgcgcaaactattaactggcgaactacttactctagcttcccggcaacaattaatagactggatg
gaggcggataaagttgcaggaccacttctgcgctcggcccttccggctggctggtttattgctgataa
atctggagccggtgagcgtgggtctcgcggtatcattgcagcactggggccagatggtaagccctccc
gtatcgtagttatctacacgacggggagtcaggcaactatggatgaacgaaatagacagatcgctgag
ataggtgcctcactgattaagcattggtaactgtcagaccaagtttactcatatatactttagattga
tttaaaacttcatttttaatttaaaaggatctaggtgaagatcctttttgataatctcatgaccaaaa
tcccttaacgtgagttttcgttccactgagcgtcagaccccgtagaaaagatcaaaggatcttcttga
gatcctttttttctgcgcgtaatctgctgcttgcaaacaaaaaaaccaccgctaccagcggtggtttg
tttgccggatcaagagctaccaactctttttccgaaggtaactggcttcagcagagcgcagataccaa
atactgttcttctagtgtagccgtagttaggccaccacttcaagaactctgtagcaccgcctacatac
ctcgctctgctaatcctgttaccagtggctgctgccagtggcgataagtcgtgtcttaccgggttgga
ctcaagacgatagttaccggataaggcgcagcggtcgggctgaacggggggttcgtgcacacagccca
gcttggagcgaacgacctacaccgaactgagatacctacagcgtgagctatgagaaagcgccacgctt
cccgaagggagaaaggcggacaggtatccggtaagcggcagggtcggaacaggagagcgcacgaggga
gcttccagggggaaacgcctggtatctttatagtcctgtcgggtttcgccacctctgacttgagcgtc
gatttttgtgatgctcgtcaggggggcggagcctatggaaaaacgccagcaacgcggcctttttacgg
ttcctggccttttgctggccttttgctcacatgttctttcctgcgttatcccctgattctgtggataa
ccgtattaccgcctttgagtgagctgataccgctcgccgcagccgaacgaccgagcgcagcgagtcag
tgagcgaggaagcggaagagcgcccaatacgcaaaccgcctctccccgcgcgttggccgattcattaa
tgcagctggcacgacaggtttcccgactggaaagcgggcagtgagcgcaacgcaattaatgtgagtta
gctcactcattaggcaccccaggctttacactttatgcttccggctcgtatgttgtgtggaattgtga
gcggataacaatttcacacaggaaacagctatgaccatgattacgccagatttaattaaggccttaat
tagg
pJP63-AAV-EF1a-minigenes-v3-WPRE-codonoptimized
SEQ ID NO: 75
ctgcgcgctcgctcgctcactgaggccgcccgggcaaagcccgggcgtcgggcgacctttggtcgccc
ggcctcagtgagcgagcgagcgcgcagagagggagtggccaactccatcactaggggttccttgtagt
taatgattaacccgccatgctacttatctaccagggtaatggggatcctctagaactatagctagaat
tctagtggatccccccgcgccggctccggtgcccgtcagtgggcagagcgcacatcgcccacagtccc
cgagaagttggggggaggggtcggcaattgaaccggtgcctagagaaggtggcgcggggtaaactggg
aaagtgatgtcgtgtactggctccgcctttttcccgagggtgggggagaaccgtatataagtgcagta
gtcgccgtgaacgttctttttcgcaacgggtttgccgccagaacacaggtaagtgccgtgtgtggttc
ccgcgggcctggcctctttacgggttatggcccttgcgtgccttgaattacttccacctggctgcagt
acgtgattcttgatcccgagcttcgggttggaagtgggtgggagagttcgaggccttgcgcttaagga
gccccttcgcctcgtgcttgagttgaggcctggcctgggcgctggggccgccgcgtgcgaatctggtg
gcaccttcgcgcctgtctcgctgctttcgataagtctctagccatttaaaatttttgatgacctgctg
cgacgctttttttctggcaagatagtcttgtaaatgcgggccaagatctgcacactggtatttcggtt
tttggggccgcgggcggcgacggggcccgtgcgtcccagcgcacatgttcggcgaggcggggcctgcg
agcgcggccaccgagaatcggacgggggtagtctcaagctggccggcctgctctggtgcctggcctcg
cgccgccgtgtatcgccccgccctgggcggcaaggctggcccggtcggcaccagttgcgtgagcggaa
agatggccgcttcccggccctgctgcagggagctcaaaatggaggacgcggcgctcgggagagcgggc
gggtgagtcacccacacaaaggaaaagggcctttccgtcctcagccgtcgcttcatgtgactccacgg
agtaccgggcgccgtccaggcacctcgattagttctcgagcttttggagtacgtcgtctttaggttgg
ggggaggggttttatgcgatggagtttccccacactgagtgggtggagactgaagttaggccagcttg
gcacttgatgtaattctccttggaatttgccctttttgagtttggatcttggttcattctcaagcctc
agacagtggttcaaagtttttttcttccatttcaggtgtcgtgagctagagctttattgcggtagttt
atcacagttaaattgctaacgcagtcagtgcttctgacacaacagtctcgaacttaagctgcagaagt
tggtcgtgaggcactgggcaggtaagtatcaaggttacaagacaggtttaaggagaccaatagaaact
gggcttgtcgagacagagaagactcttgcgtttctgataggcacctattggtcttactgacatccact
ttgcctttctctccacaggtgtccactcccagttcaattacagctcttaaggctagagtacttaatac
gactcactataggctagcctcgagaattgtacaattcacgcgggccgccATGACCCAAGATTTGTTTC
TGCCATTCTTTTCTAACGTCACCTGGTTTGCAGCTTACGACGGAGTTCCTTTCGTCGTTTCAACTGGC
TACCATTTCAGAGAAGCTGCATACGACGATCAAATCGGGTACTACAGGCGGGCAACTCGAAGGATAAG
AGCAGCTTATTGGATCTGCCTGCTTCAATTCGCTTACGCAAACAGAAATCGCTTTGCTGCTTATTCTG
TACTTTTGTTTCTTGCCTTCGTGGTGTTTCTCCTTGTTACAGCCGCTTATAATGAGTTTGCTTGTGTG
GTTGCTGACGCCGTGATCAAAACTCTGGCCGCCTATGATCTCCTCATAAGAAAATCTAACCATAACTT
TTTGGTTCAAGCCGCCGCATACGCAATCGCAAGTGAGTTCAGTAGTCTTCCATCCTACGCCGCTTTCG
CTGCCTACAAATATCTCTATTTTATAAAGGGATTGAACAATTTGAATCGCGGTGCCGCTTACCTGCTG
CTCCTTGACAGGCTTAATCAACTCGAATCCAAGATGTCTGCCGCTTACATGTGGCTCTCATACTTTAT
AGCCAGCTTCCGACTCTTCGCCAGGGCCGCTTATGAATTTGTATTTAAGAACATAGATGGGTACTTCA
AAATCTATAGCGCAGCCTACTTTCACCAAAAACTCCTTAAGTCCATTGCTGCCACTAGAGGCGCTGCT
GCTTACTTCCTTCTTGTGACCCTCGCCATTCTGACAGCTCTGAGGTTGTGTGCAGCTTACAGCGGTTA
CCTTAAATTGACAGACAATGTTTACATAAAAAACGCTGCCGCTTACCCCTTGAACATTATACCACTTA
CTACTGCTGCCAAGCTTATGGTCGCCGCTTACCATCACCACCACCATCATTAGtaagctcgcgtgatc
aagcttatcgataatcaacctctggattacaaaatttgtgaaagattgactggtattcttaactatgt
tgctccttttacgctatgtggatacgctgctttaatgcctttgtatcatgctattgcttcccgtatgg
ctttcattttctcctccttgtataaatcctggttgctgtctctttatgaggagttgtggcccgttgtc
aggcaacgtggcgtggtgtgcactgtgtttgctgacgcaacccccactggttggggcattgccaccac
ctgtcagctcctttccgggactttcgctttccccctccctattgccacggcggaactcatcgccgcct
gccttgcccgctgctggacaggggctcggctgttgggcactgacaattccgtggtgttgtcggggaaa
tcatcgtcctttccttggctgctcgcctgtgttgccacctggattctgcgcgggacgtccttctgcta
cgtcccttcggccctcaatccagcggaccttccttcccgcggcctgctgccggctctgcggcctcttc
cgcgtcttcgccttcgccctcagacgagtcggatctccctttgggccgcctccccgcatcgataccgt
cgacccgggcggcctcgaggacggggtgaactacgcctgaggatccgatctttttccctctgccaaaa
attatggggacatcatgaagccccttgagcatctgacttctggctaataaaggaaatttattttcatt
gcaatagtgtgttggaattttttgtgtctctcactcggaagcaattcgttgatctgaatttcgaccac
ccataatacccattaccctggtagataagtagcatggcgggttaatcattaactacaaggaaccccta
gtgatggagttggccactccctctctgcgcgctcgctcgctcactgaggccgggcgaccaaaggtcgc
ccgacgcccgggctttgcccgggcggcctcagtgagcgagcgagcgcgcagccttaattaacctaatt
cactggccgtcgttttacaacgtcgtgactgggaaaaccctggcgttacccaacttaatcgccttgca
gcacatccccctttcgccagctggcgtaatagcgaagaggcccgcaccgatcgcccttcccaacagtt
gcgcagcctgaatggcgaatgggacgcgccctgtagcggcgcattaagcgcggcgggtgtggtggtta
cgcgcagcgtgaccgctacacttgccagcgccctagcgcccgctcctttcgctttcttcccttccttt
ctcgccacgttcgccggctttccccgtcaagctctaaatcgggggctccctttagggttccgatttag
tgctttacggcacctcgaccccaaaaaacttgattagggtgatggttcacgtagtgggccatcgccct
gatagacggtttttcgccctttgacgttggagtccacgttctttaatagtggactcttgttccaaact
ggaacaacactcaaccctatctcggtctattcttttgatttataagggattttgccgatttcggccta
ttggttaaaaaatgagctgatttaacaaaaatttaacgcgaattttaacaaaatattaacgcttacaa
tttaggtggcacttttcggggaaatgtgcgcggaacccctatttgtttatttttctaaatacattcaa
atatgtatccgctcatgagacaataaccctgataaatgcttcaataatattgaaaaaggaagagtatg
agtattcaacatttccgtgtcgcccttattcccttttttgcggcattttgccttcctgtttttgctca
cccagaaacgctggtgaaagtaaaagatgctgaagatcagttgggtgcacgagtgggttacatcgaac
tggatctcaacagcggtaagatccttgagagttttcgccccgaagaacgttttccaatgatgagcact
tttaaagttctgctatgtggcgcggtattatcccgtattgacgccgggcaagagcaactcggtcgccg
catacactattctcagaatgacttggttgagtactcaccagtcacagaaaagcatcttacggatggca
tgacagtaagagaattatgcagtgctgccataaccatgagtgataacactgcggccaacttacttctg
acaacgatcggaggaccgaaggagctaaccgcttttttgcacaacatgggggatcatgtaactcgcct
tgatcgttgggaaccggagctgaatgaagccataccaaacgacgagcgtgacaccacgatgcctgtag
caatggcaacaacgttgcgcaaactattaactggcgaactacttactctagcttcccggcaacaatta
atagactggatggaggcggataaagttgcaggaccacttctgcgctcggcccttccggctggctggtt
tattgctgataaatctggagccggtgagcgtgggtctcgcggtatcattgcagcactggggccagatg
gtaagccctcccgtatcgtagttatctacacgacggggagtcaggcaactatggatgaacgaaataga
cagatcgctgagataggtgcctcactgattaagcattggtaactgtcagaccaagtttactcatatat
actttagattgatttaaaacttcatttttaatttaaaaggatctaggtgaagatcctttttgataatc
tcatgaccaaaatcccttaacgtgagttttcgttccactgagcgtcagaccccgtagaaaagatcaaa
ggatcttcttgagatcctttttttctgcgcgtaatctgctgcttgcaaacaaaaaaaccaccgctacc
agcggtggtttgtttgccggatcaagagctaccaactctttttccgaaggtaactggcttcagcagag
cgcagataccaaatactgttcttctagtgtagccgtagttaggccaccacttcaagaactctgtagca
ccgcctacatacctcgctctgctaatcctgttaccagtggctgctgccagtggcgataagtcgtgtct
taccgggttggactcaagacgatagttaccggataaggcgcagcggtcgggctgaacggggggttcgt
gcacacagcccagcttggagcgaacgacctacaccgaactgagatacctacagcgtgagctatgagaa
agcgccacgcttcccgaagggagaaaggcggacaggtatccggtaagcggcagggtcggaacaggaga
gcgcacgagggagcttccagggggaaacgcctggtatctttatagtcctgtcgggtttcgccacctct
gacttgagcgtcgatttttgtgatgctcgtcaggggggcggagcctatggaaaaacgccagcaacgcg
gcctttttacggttcctggccttttgctggccttttgctcacatgttctttcctgcgttatcccctga
ttctgtggataaccgtattaccgcctttgagtgagctgataccgctcgccgcagccgaacgaccgagc
gcagcgagtcagtgagcgaggaagcggaagagcgcccaatacgcaaaccgcctctccccgcgcgttgg
ccgattcattaatgcagctggcacgacaggtttcccgactggaaagcgggcagtgagcgcaacgcaat
taatgtgagttagctcactcattaggcaccccaggctttacactttatgcttccggctcgtatgttgt
gtggaattgtgagcggataacaatttcacacaggaaacagctatgaccatgattacgccagatttaat
taaggccttaattagg
pJP64-AAV-EF1a-minigenes-v4-WPRE-codonoptimized
SEQ ID NO: 76
ctgcgcgctcgctcgctcactgaggccgcccgggcaaagcccgggcgtcgggcgacctttggtcgccc
ggcctcagtgagcgagcgagcgcgcagagagggagtggccaactccatcactaggggttccttgtagt
taatgattaacccgccatgctacttatctaccagggtaatggggatcctctagaactatagctagaat
tctagtggatccccccgcgccggctccggtgcccgtcagtgggcagagcgcacatcgcccacagtccc
cgagaagttggggggaggggtcggcaattgaaccggtgcctagagaaggtggcgcggggtaaactggg
aaagtgatgtcgtgtactggctccgcctttttcccgagggtgggggagaaccgtatataagtgcagta
gtcgccgtgaacgttctttttcgcaacgggtttgccgccagaacacaggtaagtgccgtgtgtggttc
ccgcgggcctggcctctttacgggttatggcccttgcgtgccttgaattacttccacctggctgcagt
acgtgattcttgatcccgagcttcgggttggaagtgggtgggagagttcgaggccttgcgcttaagga
gccccttcgcctcgtgcttgagttgaggcctggcctgggcgctggggccgccgcgtgcgaatctggtg
gcaccttcgcgcctgtctcgctgctttcgataagtctctagccatttaaaatttttgatgacctgctg
cgacgctttttttctggcaagatagtcttgtaaatgcgggccaagatctgcacactggtatttcggtt
tttggggccgcgggcggcgacggggcccgtgcgtcccagcgcacatgttcggcgaggcggggcctgcg
agcgcggccaccgagaatcggacgggggtagtctcaagctggccggcctgctctggtgcctggcctcg
cgccgccgtgtatcgccccgccctgggcggcaaggctggcccggtcggcaccagttgcgtgagcggaa
agatggccgcttcccggccctgctgcagggagctcaaaatggaggacgcggcgctcgggagagcgggc
gggtgagtcacccacacaaaggaaaagggcctttccgtcctcagccgtcgcttcatgtgactccacgg
agtaccgggcgccgtccaggcacctcgattagttctcgagcttttggagtacgtcgtctttaggttgg
ggggaggggttttatgcgatggagtttccccacactgagtgggtggagactgaagttaggccagcttg
gcacttgatgtaattctccttggaatttgccctttttgagtttggatcttggttcattctcaagcctc
agacagtggttcaaagtttttttcttccatttcaggtgtcgtgagctagagctttattgcggtagttt
atcacagttaaattgctaacgcagtcagtgcttctgacacaacagtctcgaacttaagctgcagaagt
tggtcgtgaggcactgggcaggtaagtatcaaggttacaagacaggtttaaggagaccaatagaaact
gggcttgtcgagacagagaagactcttgcgtttctgataggcacctattggtcttactgacatccact
ttgcctttctctccacaggtgtccactcccagttcaattacagctcttaaggctagagtacttaatac
gactcactataggctagcctcgagaattgtacaattcacgcgggccgccATGACACCTATCAATCTCG
TGCGGGACCTTCCCCAAGGTTTCTCCGCTCTGGAGCCTTTGGTCGCTGCTTACTTGAACCAGCTTGAA
TCTAAGATGAGTGGGAAAGGCCAGCAACAACAGGGTCAAACCGTGACTAAGAAGTCTGCCGCTGAAGC
ATCCAAGAAGCCACGACAAAAGCGGACCGCCACCAAAGCATATAATGTGACACAGGCTTTTGGGCGAC
GAGGACCCGAGCAAACACAAGCCGCATACTATCTCCAGCCCAGGACTTTCCTGCTGGCCGCTTATCTT
CCTTTCTTTTCCAACGTAACTTGGTTCCACGCTATCCATGTTGCTGCCTATGATGCAGCTCTTGCCCT
CTTGCTCTTGGATCGCCTGAACCAGCTCGCCGCTTACTTCTTGTTCCTCACCTGGATCTGTCTCGCAG
CTTACAACAGAAATAGATTTCTCTACATAATCAAGCTCATATTTCTGTGGGCAGCTTATAGCGAGGAG
ACAGGAACTTTGATTGTAAACTCAGTGCTTCTTTTTGCCGCATATACCAACGGTACCAAACGCTTCGA
CAACCCTGTTCTGCCCTTCAACGCTGCATACCACGGGAAAGAGGATCTGAAATTTCCTAGAGGCCAGG
GCGTCCCCATAAATACCAACAGCTCCCCAGACGACCAAATTGGTTATTATCGCCGCGCTACCCGGAGG
ATCGCAGCCTATAGTGTCCTTTTGTTCCTGGCATTCGTGGCTGCATATAGATTCCCAAACATCACAAA
TTTGTGCCCTTTTGGCGAGGTCTTTAACGCTACCAGGTTTGCTGCTTACACACTCGCCTGCTTCGTAC
TGGCAGCCGTGTACCGGATCAACTGGGCAGCATACTTTTTGTTGGTTACTCTGGCAATTCTCGCTGCA
TACCATCACCATCACCACCATTAGtaagctcgcgtgatcaagcttatcgataatcaacctctggatta
caaaatttgtgaaagattgactggtattcttaactatgttgctccttttacgctatgtggatacgctg
ctttaatgcctttgtatcatgctattgcttcccgtatggctttcattttctcctccttgtataaatcc
tggttgctgtctctttatgaggagttgtggcccgttgtcaggcaacgtggcgtggtgtgcactgtgtt
tgctgacgcaacccccactggttggggcattgccaccacctgtcagctcctttccgggactttcgctt
tccccctccctattgccacggcggaactcatcgccgcctgccttgcccgctgctggacaggggctcgg
ctgttgggcactgacaattccgtggtgttgtcggggaaatcatcgtcctttccttggctgctcgcctg
tgttgccacctggattctgcgcgggacgtccttctgctacgtcccttcggccctcaatccagcggacc
ttccttcccgcggcctgctgccggctctgcggcctcttccgcgtcttcgccttcgccctcagacgagt
cggatctccctttgggccgcctccccgcatcgataccgtcgacccgggcggcctcgaggacggggtga
actacgcctgaggatccgatctttttccctctgccaaaaattatggggacatcatgaagccccttgag
catctgacttctggctaataaaggaaatttattttcattgcaatagtgtgttggaattttttgtgtct
ctcactcggaagcaattcgttgatctgaatttcgaccacccataatacccattaccctggtagataag
tagcatggcgggttaatcattaactacaaggaacccctagtgatggagttggccactccctctctgcg
cgctcgctcgctcactgaggccgggcgaccaaaggtcgcccgacgcccgggctttgcccgggcggcct
cagtgagcgagcgagcgcgcagccttaattaacctaattcactggccgtcgttttacaacgtcgtgac
tgggaaaaccctggcgttacccaacttaatcgccttgcagcacatccccctttcgccagctggcgtaa
tagcgaagaggcccgcaccgatcgcccttcccaacagttgcgcagcctgaatggcgaatgggacgcgc
cctgtagcggcgcattaagcgcggcgggtgtggtggttacgcgcagcgtgaccgctacacttgccagc
gccctagcgcccgctcctttcgctttcttcccttcctttctcgccacgttcgccggctttccccgtca
agctctaaatcgggggctccctttagggttccgatttagtgctttacggcacctcgaccccaaaaaac
ttgattagggtgatggttcacgtagtgggccatcgccctgatagacggtttttcgccctttgacgttg
gagtccacgttctttaatagtggactcttgttccaaactggaacaacactcaaccctatctcggtcta
ttcttttgatttataagggattttgccgatttcggcctattggttaaaaaatgagctgatttaacaaa
aatttaacgcgaattttaacaaaatattaacgcttacaatttaggtggcacttttcggggaaatgtgc
gcggaacccctatttgtttatttttctaaatacattcaaatatgtatccgctcatgagacaataaccc
tgataaatgcttcaataatattgaaaaaggaagagtatgagtattcaacatttccgtgtcgcccttat
tcccttttttgcggcattttgccttcctgtttttgctcacccagaaacgctggtgaaagtaaaagatg
ctgaagatcagttgggtgcacgagtgggttacatcgaactggatctcaacagcggtaagatccttgag
agttttcgccccgaagaacgttttccaatgatgagcacttttaaagttctgctatgtggcgcggtatt
atcccgtattgacgccgggcaagagcaactcggtcgccgcatacactattctcagaatgacttggttg
agtactcaccagtcacagaaaagcatcttacggatggcatgacagtaagagaattatgcagtgctgcc
ataaccatgagtgataacactgcggccaacttacttctgacaacgatcggaggaccgaaggagctaac
cgcttttttgcacaacatgggggatcatgtaactcgccttgatcgttgggaaccggagctgaatgaag
ccataccaaacgacgagcgtgacaccacgatgcctgtagcaatggcaacaacgttgcgcaaactatta
actggcgaactacttactctagcttcccggcaacaattaatagactggatggaggcggataaagttgc
aggaccacttctgcgctcggcccttccggctggctggtttattgctgataaatctggagccggtgagc
gtgggtctcgcggtatcattgcagcactggggccagatggtaagccctcccgtatcgtagttatctac
acgacggggagtcaggcaactatggatgaacgaaatagacagatcgctgagataggtgcctcactgat
taagcattggtaactgtcagaccaagtttactcatatatactttagattgatttaaaacttcattttt
aatttaaaaggatctaggtgaagatcctttttgataatctcatgaccaaaatcccttaacgtgagttt
tcgttccactgagcgtcagaccccgtagaaaagatcaaaggatcttcttgagatcctttttttctgcg
cgtaatctgctgcttgcaaacaaaaaaaccaccgctaccagcggtggtttgtttgccggatcaagagc
taccaactctttttccgaaggtaactggcttcagcagagcgcagataccaaatactgttcttctagtg
tagccgtagttaggccaccacttcaagaactctgtagcaccgcctacatacctcgctctgctaatcct
gttaccagtggctgctgccagtggcgataagtcgtgtcttaccgggttggactcaagacgatagttac
cggataaggcgcagcggtcgggctgaacggggggttcgtgcacacagcccagcttggagcgaacgacc
tacaccgaactgagatacctacagcgtgagctatgagaaagcgccacgcttcccgaagggagaaaggc
ggacaggtatccggtaagcggcagggtcggaacaggagagcgcacgagggagcttccagggggaaacg
cctggtatctttatagtcctgtcgggtttcgccacctctgacttgagcgtcgatttttgtgatgctcg
tcaggggggcggagcctatggaaaaacgccagcaacgcggcctttttacggttcctggccttttgctg
gccttttgctcacatgttctttcctgcgttatcccctgattctgtggataaccgtattaccgcctttg
agtgagctgataccgctcgccgcagccgaacgaccgagcgcagcgagtcagtgagcgaggaagcggaa
gagcgcccaatacgcaaaccgcctctccccgcgcgttggccgattcattaatgcagctggcacgacag
gtttcccgactggaaagcgggcagtgagcgcaacgcaattaatgtgagttagctcactcattaggcac
cccaggctttacactttatgcttccggctcgtatgttgtgtggaattgtgagcggataacaatttcac
acaggaaacagctatgaccatgattacgccagatttaattaaggccttaattagg
pJP65-AAV-EF1a-minigenes-v5-WPRE-codonoptimized
SEQ ID NO: 77
ctgcgcgctcgctcgctcactgaggccgcccgggcaaagcccgggcgtcgggcgacctttggtcgccc
ggcctcagtgagcgagcgagcgcgcagagagggagtggccaactccatcactaggggttccttgtagt
taatgattaacccgccatgctacttatctaccagggtaatggggatcctctagaactatagctagaat
tctagtggatccccccgcgccggctccggtgcccgtcagtgggcagagcgcacatcgcccacagtccc
cgagaagttggggggaggggtcggcaattgaaccggtgcctagagaaggtggcgcggggtaaactggg
aaagtgatgtcgtgtactggctccgcctttttcccgagggtgggggagaaccgtatataagtgcagta
gtcgccgtgaacgttctttttcgcaacgggtttgccgccagaacacaggtaagtgccgtgtgtggttc
ccgcgggcctggcctctttacgggttatggcccttgcgtgccttgaattacttccacctggctgcagt
acgtgattcttgatcccgagcttcgggttggaagtgggtgggagagttcgaggccttgcgcttaagga
gccccttcgcctcgtgcttgagttgaggcctggcctgggcgctggggccgccgcgtgcgaatctggtg
gcaccttcgcgcctgtctcgctgctttcgataagtctctagccatttaaaatttttgatgacctgctg
cgacgctttttttctggcaagatagtcttgtaaatgcgggccaagatctgcacactggtatttcggtt
tttggggccgcgggcggcgacggggcccgtgcgtcccagcgcacatgttcggcgaggcggggcctgcg
agcgcggccaccgagaatcggacgggggtagtctcaagctggccggcctgctctggtgcctggcctcg
cgccgccgtgtatcgccccgccctgggcggcaaggctggcccggtcggcaccagttgcgtgagcggaa
agatggccgcttcccggccctgctgcagggagctcaaaatggaggacgcggcgctcgggagagcgggc
gggtgagtcacccacacaaaggaaaagggcctttccgtcctcagccgtcgcttcatgtgactccacgg
agtaccgggcgccgtccaggcacctcgattagttctcgagcttttggagtacgtcgtctttaggttgg
ggggaggggttttatgcgatggagtttccccacactgagtgggtggagactgaagttaggccagcttg
gcacttgatgtaattctccttggaatttgccctttttgagtttggatcttggttcattctcaagcctc
agacagtggttcaaagtttttttcttccatttcaggtgtcgtgagctagagctttattgcggtagttt
atcacagttaaattgctaacgcagtcagtgcttctgacacaacagtctcgaacttaagctgcagaagt
tggtcgtgaggcactgggcaggtaagtatcaaggttacaagacaggtttaaggagaccaatagaaact
gggcttgtcgagacagagaagactcttgcgtttctgataggcacctattggtcttactgacatccact
ttgcctttctctccacaggtgtccactcccagttcaattacagctcttaaggctagagtacttaatac
gactcactataggctagcctcgagaattgtacaattcacgcgggccgccATGTGTAATGACCCTTTCC
TGGGGGTTTATTATCATAAGAATAATAAATCCTGGATGGAAAGCGAGTTCAGGGTCGCAGCATATGAT
CTGGATGACTTCTCTAAACAGCTCCAGCAGTCCATGTCATCTGCCGATAGCACTGCTGCATATAGCCT
GCTGATCGTAAATAACGCAACAAATGTCGTTATAAAAGTTGCTGCTTATAACTTGTTGAAGGACTGTC
CAGCCGTCGCCGCCTACTTTCACCAAAAGCTTCTTAAATCAATAGCAGCAACACGGGGAGCCGCTGCA
TATGTCGTCCAAACCATTGAGGTAAACAGTTTCTCTGGGTACCTGAAGGCCGCATACTATAAATTTGT
ACGCATTCAACCTGGGCAGACATTTTCAGTGCTGGCTGCATACGCAAAACTTATGGTCGTAATCCCAG
ACTACAATACTTACAAGAATGCAGCATACGTCTTGAAACTTAAAGTGGATACTGCTAATCCTAAAACA
CCAAAGGCTGCTTACACCGGAATCGCAGTAGAGCAGGATAAAAATACCCAGGAGGTATTCGCACAGGT
CAAGCAAATCTATAAAACTCCCCCTATTAAAGACTTTGGTGGTTTTAACTTTTCCCAGATTCTTCCCG
ATCCATCTAAACCAAGCAAAAGGAGCTTTATTGAAGATTTGCTGTTCAACAAAGTCACATTGGCTGAC
GCAGGTTTCATTAAACAGTATGGGGATTGCCTTGCCGCCTACAGAGGCATGGTTCTGGGGAGTCTCGC
AGCAACCGTCCGGCTTCAAGCCGCCTATGCTTTGGCATATTACAACACTACCAAGGCCGCATACCCAA
CAGTAGTGGTCAATGCAGCCAATGTTTATCTCAAGCACGGGGCTGCTTACCACCATCACCACCATCAT
TAGtaagctcgcgtgatcaagcttatcgataatcaacctctggattacaaaatttgtgaaagattgac
tggtattcttaactatgttgctccttttacgctatgtggatacgctgctttaatgcctttgtatcatg
ctattgcttcccgtatggctttcattttctcctccttgtataaatcctggttgctgtctctttatgag
gagttgtggcccgttgtcaggcaacgtggcgtggtgtgcactgtgtttgctgacgcaacccccactgg
ttggggcattgccaccacctgtcagctcctttccgggactttcgctttccccctccctattgccacgg
cggaactcatcgccgcctgccttgcccgctgctggacaggggctcggctgttgggcactgacaattcc
gtggtgttgtcggggaaatcatcgtcctttccttggctgctcgcctgtgttgccacctggattctgcg
cgggacgtccttctgctacgtcccttcggccctcaatccagcggaccttccttcccgcggcctgctgc
cggctctgcggcctcttccgcgtcttcgccttcgccctcagacgagtcggatctccctttgggccgcc
tccccgcatcgataccgtcgacccgggcggcctcgaggacggggtgaactacgcctgaggatccgatc
tttttccctctgccaaaaattatggggacatcatgaagccccttgagcatctgacttctggctaataa
aggaaatttattttcattgcaatagtgtgttggaattttttgtgtctctcactcggaagcaattcgtt
gatctgaatttcgaccacccataatacccattaccctggtagataagtagcatggcgggttaatcatt
aactacaaggaacccctagtgatggagttggccactccctctctgcgcgctcgctcgctcactgaggc
cgggcgaccaaaggtcgcccgacgcccgggctttgcccgggcggcctcagtgagcgagcgagcgcgca
gccttaattaacctaattcactggccgtcgttttacaacgtcgtgactgggaaaaccctggcgttacc
caacttaatcgccttgcagcacatccccctttcgccagctggcgtaatagcgaagaggcccgcaccga
tcgcccttcccaacagttgcgcagcctgaatggcgaatgggacgcgccctgtagcggcgcattaagcg
cggcgggtgtggtggttacgcgcagcgtgaccgctacacttgccagcgccctagcgcccgctcctttc
gctttcttcccttcctttctcgccacgttcgccggctttccccgtcaagctctaaatcgggggctccc
tttagggttccgatttagtgctttacggcacctcgaccccaaaaaacttgattagggtgatggttcac
gtagtgggccatcgccctgatagacggtttttcgccctttgacgttggagtccacgttctttaatagt
ggactcttgttccaaactggaacaacactcaaccctatctcggtctattcttttgatttataagggat
tttgccgatttcggcctattggttaaaaaatgagctgatttaacaaaaatttaacgcgaattttaaca
aaatattaacgcttacaatttaggtggcacttttcggggaaatgtgcgcggaacccctatttgtttat
ttttctaaatacattcaaatatgtatccgctcatgagacaataaccctgataaatgcttcaataatat
tgaaaaaggaagagtatgagtattcaacatttccgtgtcgcccttattcccttttttgcggcattttg
ccttcctgtttttgctcacccagaaacgctggtgaaagtaaaagatgctgaagatcagttgggtgcac
gagtgggttacatcgaactggatctcaacagcggtaagatccttgagagttttcgccccgaagaacgt
tttccaatgatgagcacttttaaagttctgctatgtggcgcggtattatcccgtattgacgccgggca
agagcaactcggtcgccgcatacactattctcagaatgacttggttgagtactcaccagtcacagaaa
agcatcttacggatggcatgacagtaagagaattatgcagtgctgccataaccatgagtgataacact
gcggccaacttacttctgacaacgatcggaggaccgaaggagctaaccgcttttttgcacaacatggg
ggatcatgtaactcgccttgatcgttgggaaccggagctgaatgaagccataccaaacgacgagcgtg
acaccacgatgcctgtagcaatggcaacaacgttgcgcaaactattaactggcgaactacttactcta
gcttcccggcaacaattaatagactggatggaggcggataaagttgcaggaccacttctgcgctcggc
ccttccggctggctggtttattgctgataaatctggagccggtgagcgtgggtctcgcggtatcattg
cagcactggggccagatggtaagccctcccgtatcgtagttatctacacgacggggagtcaggcaact
atggatgaacgaaatagacagatcgctgagataggtgcctcactgattaagcattggtaactgtcaga
ccaagtttactcatatatactttagattgatttaaaacttcatttttaatttaaaaggatctaggtga
agatcctttttgataatctcatgaccaaaatcccttaacgtgagttttcgttccactgagcgtcagac
cccgtagaaaagatcaaaggatcttcttgagatcctttttttctgcgcgtaatctgctgcttgcaaac
aaaaaaaccaccgctaccagcggtggtttgtttgccggatcaagagctaccaactctttttccgaagg
taactggcttcagcagagcgcagataccaaatactgttcttctagtgtagccgtagttaggccaccac
ttcaagaactctgtagcaccgcctacatacctcgctctgctaatcctgttaccagtggctgctgccag
tggcgataagtcgtgtcttaccgggttggactcaagacgatagttaccggataaggcgcagcggtcgg
gctgaacggggggttcgtgcacacagcccagcttggagcgaacgacctacaccgaactgagataccta
cagcgtgagctatgagaaagcgccacgcttcccgaagggagaaaggcggacaggtatccggtaagcgg
cagggtcggaacaggagagcgcacgagggagcttccagggggaaacgcctggtatctttatagtcctg
tcgggtttcgccacctctgacttgagcgtcgatttttgtgatgctcgtcaggggggcggagcctatgg
aaaaacgccagcaacgcggcctttttacggttcctggccttttgctggccttttgctcacatgttctt
tcctgcgttatcccctgattctgtggataaccgtattaccgcctttgagtgagctgataccgctcgcc
gcagccgaacgaccgagcgcagcgagtcagtgagcgaggaagcggaagagcgcccaatacgcaaaccg
cctctccccgcgcgttggccgattcattaatgcagctggcacgacaggtttcccgactggaaagcggg
cagtgagcgcaacgcaattaatgtgagttagctcactcattaggcaccccaggctttacactttatgc
ttccggctcgtatgttgtgtggaattgtgagcggataacaatttcacacaggaaacagctatgaccat
gattacgccagatttaattaaggccttaattagg
pVP22b-B.1.351-hextra Pro-UTR
SEQ ID NO: 78
gacggatcgggagatctcccgatcccctatggtgcactctcagtacaatctgctctgatgccgcatag
ttaagccagtatctgctccctgcttgtgtgttggaggtcgctgagtagtgcgcgagcaaaatttaagc
tacaacaaggcaaggcttgaccgacaattgcatgaagaatctgcttagggttaggcgttttgcgctgc
ttcgcgatgtacgggccagatatacgcgttgacattgattattgactagttattaatagtaatcaatt
acggggtcattagttcatagcccatatatggagttccgcgttacataacttacggtaaatggcccgcc
tggctgaccgcccaacgacccccgcccattgacgtcaataatgacgtatgttcccatagtaacgccaa
tagggactttccattgacgtcaatgggtggagtatttacggtaaactgcccacttggcagtacatcaa
gtgtatcatatgccaagtacgccccctattgacgtcaatgacggtaaatggcccgcctggcattatgc
ccagtacatgaccttatgggactttcctacttggcagtacatctacgtattagtcatcgctattacca
tggtgatgcggttttggcagtacatcaatgggcgtggatagcggtttgactcacggggatttccaagt
ctccaccccattgacgtcaatgggagtttgttttggcaccaaaatcaacgggactttccaaaatgtcg
taacaactccgccccattgacgcaaatgggcggtaggcgtgtacggtgggaggtctatataagcagag
ctctctggctaactagagaacccactgcttactggcttatcgaaattaatacgactcactatagggag
acccaagctggctagccaccGAGAATAAACTAGTATTCTTCTGGTCCCCACAGACTCAGAGAGAACCC
GCCACCATgTTTGTGTTCCTGGTGCTGCTGCCACTGGTGTCCAGCCAGTGTGTGAACTTCACCACCAG
GACCCAACTTCCTCCTGCCTACACCAACTCCTTCACCAGGGGAGTCTACTACCCTGACAAGGTGTTCA
GGTCCTCTGTGCTGCACAGCACCCAGGACCTGTTCCTGCCATTCTTCAGCAATGTGACCTGGTTCCAT
GCCATCCATGTGTCTGGCACCAATGGCACCAAGAGGTTTGCCAACCCTGTGCTGCCATTCAATGATGG
AGTCTACTTTGCCAGCACAGAGAAGAGCAACATCATCAGGGGCTGGATTTTTGGCACCACCCTGGACA
GCAAGACCCAGTCCCTGCTGATTGTGAACAATGCCACCAATGTGGTGATTAAGGTGTGTGAGTTCCAG
TTCTGTAATGACCCATTCCTGGGAGTCTACTACCACAAGAACAACAAGTCCTGGATGGAGTCTGAGTT
CAGGGTCTACTCCTCTGCCAACAACTGTACCTTTGAATATGTGAGCCAACCATTCCTGATGGACTTGG
AGGGCAAGCAGGGCAACTTCAAGAACCTGAGGGAGTTTGTGTTCAAGAACATTGATGGCTACTTCAAG
ATTTACAGCAAACACACACCAATCAACCTGGTGAGGGGCCTGCCACAGGGCTTCTCTGCCTTGGAACC
ACTGGTGGACCTGCCAATTGGCATCAACATCACCAGGTTCCAGACCCTGCTGGCTCTGCACATTTCCT
ACCTGACACCTGGAGACTCCTCCTCTGGCTGGACAGCAGGAGCAGCAGCCTACTATGTGGGCTACCTC
CAACCAAGGACCTTCCTGCTGAAATACAATGAGAATGGCACCATCACAGATGCTGTGGACTGTGCCCT
GGACCCACTGTCTGAGACCAAGTGTACCCTGAAATCCTTCACAGTGGAGAAGGGCATCTACCAGACCA
GCAACTTCAGGGTCCAACCAACAGAGAGCATTGTGAGGTTTCCAAACATCACCAACCTGTGTCCATTT
GGAGAGGTGTTCAATGCCACCAGGTTTGCCTCTGTCTATGCCTGGAACAGGAAGAGGATTAGCAACTG
TGTGGCTGACTACTCTGTGCTCTACAACTCTGCCTCCTTCAGCACCTTCAAGTGTTATGGAGTGAGCC
CAACCAAACTGAATGACCTGTGTTTCACCAATGTCTATGCTGACTCCTTTGTGATTAGGGGAGATGAG
GTGAGACAGATTGCCCCTGGACAAACAGGCAACATTGCTGACTACAACTACAAACTGCCTGATGACTT
CACAGGCTGTGTGATTGCCTGGAACAGCAACAACCTGGACAGCAAGGTGGGAGGCAACTACAACTACC
TCTACAGACTGTTCAGGAAGAGCAACCTGAAACCATTTGAGAGGGACATCAGCACAGAGATTTACCAG
GCTGGCAGCACACCATGTAATGGAGTGAAGGGCTTCAACTGTTACTTTCCACTCCAATCCTATGGCTT
CCAACCAACCTACGGAGTGGGCTACCAACCATACAGGGTGGTGGTGCTGTCCTTTGAACTGCTCCATG
CCCCTGCCACAGTGTGTGGACCAAAGAAGAGCACCAACCTGGTGAAGAACAAGTGTGTGAACTTCAAC
TTCAATGGACTGACAGGCACAGGAGTGCTGACAGAGAGCAACAAGAAGTTCCTGCCATTCCAACAGTT
TGGCAGGGACATTGCTGACACCACAGATGCTGTGAGGGACCCACAGACCTTGGAGATTCTGGACATCA
CACCATGTTCCTTTGGAGGAGTGTCTGTGATTACACCTGGCACCAACACCAGCAACCAGGTGGCTGTG
CTCTACCAGGATGTGAACTGTACTGAGGTGCCTGTGGCTATCCATGCTGACCAACTTACACCAACCTG
GAGGGTCTACAGCACAGGCAGCAATGTGTTCCAGACCAGGGCTGGCTGTCTGATTGGAGCAGAGCATG
TGAACAACTCCTATGAGTGTGACATCCCAATTGGAGCAGGCATCTGTGCCTCCTACCAGACCCAGACC
AACAGCCCAGGCTCTGCATCTTCTGTGGCAAGCCAGAGCATCATTGCCTACACAATGAGTCTGGGAGT
GGAGAACTCTGTGGCTTACAGCAACAACAGCATTGCCATCCCAACCAACTTCACCATCTCTGTGACCA
CAGAGATTCTGCCTGTGAGTATGACCAAGACCTCTGTGGACTGTACAATGTATATCTGTGGAGACAGC
ACAGAGTGTAGCAACCTGCTGCTCCAATATGGCTCCTTCTGTACCCAACTTAACAGGGCTCTGACAGG
CATTGCTGTGGAACAGGACAAGAACACCCAGGAGGTGTTTGCCCAGGTGAAGCAGATTTACAAGACAC
CTCCAATCAAGGACTTTGGAGGCTTCAACTTCAGCCAGATTCTGCCTGACCCAAGCAAGCCAAGCAAG
AGGTCCCCTATTGAGGACCTGCTGTTCAACAAGGTGACCCTGGCTGATGCTGGCTTCATCAAGCAATA
TGGAGACTGTCTGGGAGACATCGCTGCTAGGGACCTGATTTGTGCCCAGAAGTTCAATGGACTGACAG
TGCTGCCTCCACTGCTGACAGATGAGATGATTGCCCAATACACCTCTGCCCTGCTGGCTGGAACCATC
ACCTCTGGATGGACCTTTGGAGCAGGACCAGCCCTCCAAATCCCATTTCCAATGCAGATGGCTTACAG
GTTCAATGGCATTGGAGTGACCCAGAATGTGCTCTATGAGAACCAGAAACTGATTGCCAACCAGTTCA
ACTCTGCCATTGGCAAGATTCAGGACTCCCTGTCCAGCACACCATCTGCCCTGGGCAAGCTCCAAGAT
GTGGTGAACCAGAATGCCCAGGCTCTGAACACCCTGGTGAAGCAACTTTCCAGCAACTTTGGAGCCAT
CTCCTCTGTGCTGAATGACATCCTGAGCAGACTGGACCCACCAGAGGCTGAGGTCCAGATTGACAGAC
TGATTACAGGCAGACTCCAATCCCTCCAAACCTATGTGACCCAACAACTTATCAGGGCTGCTGAGATT
AGGGCATCTGCCAACCTGGCTGCCACCAAGATGAGTGAGTGTGTGCTGGGACAAAGCAAGAGGGTGGA
CTTCTGTGGCAAGGGCTACCACCTGATGAGTTTTCCACAGTCTGCCCCTCATGGAGTGGTGTTCCTGC
ATGTGACCTATGTGCCTGCCCAGGAGAAGAACTTCACCACAGCCCCTGCCATCTGCCATGATGGCAAG
GCTCACTTTCCAAGGGAGGGAGTGTTTGTGAGCAATGGCACCCACTGGTTTGTGACCCAGAGGAACTT
CTATGAACCACAGATTATCACCACAGACAACACCTTTGTGTCTGGCAACTGTGATGTGGTGATTGGCA
TTGTGAACAACACAGTCTATGACCCACTCCAACCTGAACTGGACTCCTTCAAGGAGGAACTGGACAAA
TACTTCAAGAACCACACCAGCCCTGATGTGGACCTGGGAGACATCTCTGGCATCAATGCCTCTGTGGT
GAACATCCAGAAGGAGATTGACAGACTGAATGAGGTGGCTAAGAACCTGAATGAGTCCCTGATTGACC
TCCAAGAACTGGGCAAATATGAACAATACATCAAGTGGCCATGGTACATCTGGCTGGGCTTCATTGCT
GGACTGATTGCCATTGTGATGGTGACCATAATGCTGTGTTGTATGACCTCCTGTTGTTCCTGTCTGAA
AGGCTGTTGTTCCTGTGGCTCCTGTTGTAAGTTTGATGAGGATGACTCTGAACCTGTGCTGAAAGGAG
TGAAACTGCACTACACCTGATGACTCGAGCTGGTACTGCATGCACGCAATGCTAGCTGCCCCTTTCCC
GTCCTGGGTACCCCGAGTCTCCCCCGACCTCGGGTCCCAGGTATGCTCCCACCTCCACCTGCCCCACT
CACCACCTCTGCTAGTTCCAGACACCTCCCAAGCACGCAGCAATGCAGCTCAAAACGCTTAGCCTAGC
CACACCCCCACGGGAAACAGCAGTGATTAACCTTTAGCAATAAACGAAAGTTTAACTAAGCTATACTA
ACCCCAGGGTTGGTCAATTTCGTGCCAGCCACACCCTGGAGCTAGCaaaccgctgatcagcctcgact
gtgccttctagttgccagccatctgttgtttgcccctcccccgtgccttccttgaccctggaaggtgc
cactcccactgtcctttcctaataaaatgaggaaattgcatcgcattgtctgagtaggtgtcattcta
ttctggggggtggggtggggcaggacagcaagggggaggattgggaagacaatagcaggcatgctggg
gatgcggtgggctctatggcttctgaggcggaaagaaccagctggggctctagggggtatccccacgc
gccctgtagcggcgcattaagcgcggcgggtgtggtggttacgcgcagcgtgaccgctacacttgcca
gcgccctagcgcccgctcctttcgctttcttcccttcctttctcgccacgttcgccggctttccccgt
caagctctaaatcgggggctccctttagggttccgatttagtgctttacggcacctcgaccccaaaaa
acttgattagggtgatggttcacgtagtgggccatcgccctgatagacggtttttcgccctttgacgt
tggagtccacgttctttaatagtggactcttgttccaaactggaacaacactcaaccctatctcggtc
tattcttttgatttataagggattttgccgatttcggcctattggttaaaaaatgagctgatttaaca
aaaatttaacgcgaattaattctgtggaatgtgtgtcagttagggtgtggaaagtccccaggctcccc
agcaggcagaagtatgcaaagcatgcatctcaattagtcagcaaccaggtgtggaaagtccccaggct
ccccagcaggcagaagtatgcaaagcatgcatctcaattagtcagcaaccatagtcccgcccctaact
ccgcccatcccgcccctaactccgcccagttccgcccattctccgccccatggctgactaattttttt
tatttatgcagaggccgaggccgcctctgcctctgagctattccagaagtagtgaggaggcttttttg
gaggcctaggcttttgcaaaaagctcccgggagcttgtatatccattttcggatctgatcaagagaca
ggatgaggatcgtttcgcatgattgaacaagatggattgcacgcaggttctccggccgcttgggtgga
gaggctattcggctatgactgggcacaacagacaatcggctgctctgatgccgccgtgttccggctgt
cagcgcaggggcgcccggttctttttgtcaagaccgacctgtccggtgccctgaatgaactgcaggac
gaggcagcgcggctatcgtggctggccacgacgggcgttccttgcgcagctgtgctcgacgttgtcac
tgaagcgggaagggactggctgctattgggcgaagtgccggggcaggatctcctgtcatctcaccttg
ctcctgccgagaaagtatccatcatggctgatgcaatgcggcggctgcatacgcttgatccggctacc
tgcccattcgaccaccaagcgaaacatcgcatcgagcgagcacgtactcggatggaagccggtcttgt
cgatcaggatgatctggacgaagagcatcaggggctcgcgccagccgaactgttcgccaggctcaagg
cgcgcatgcccgacggcgaggatctcgtcgtgacccatggcgatgcctgcttgccgaatatcatggtg
gaaaatggccgcttttctggattcatcgactgtggccggctgggtgtggcggaccgctatcaggacat
agcgttggctacccgtgatattgctgaagagcttggcggcgaatgggctgaccgcttcctcgtgcttt
acggtatcgccgctcccgattcgcagcgcatcgccttctatcgccttcttgacgagttcttctgagcg
ggactctggggttcgaaatgaccgaccaagcgacgcccaacctgccatcacgagatttcgattccacc
gccgccttctatgaaaggttgggcttcggaatcgttttccgggacgccggctggatgatcctccagcg
cggggatctcatgctggagttcttcgcccaccccaacttgtttattgcagcttataatggttacaaat
aaagcaatagcatcacaaatttcacaaataaagcatttttttcactgcattctagttgtggtttgtcc
aaactcatcaatgtatcttatcatgtctgtataccgtcgacctctagctagagcttggcgtaatcatg
gtcatagctgtttcctgtgtgaaattgttatccgctcacaattccacacaacatacgagccggaagca
taaagtgtaaagcctggggtgcctaatgagtgagctaactcacattaattgcgttgcgctcactgccc
gctttccagtcgggaaacctgtcgtgccagctgcattaatgaatcggccaacgcgcggggagaggcgg
tttgcgtattgggcgctcttccgcttcctcgctcactgactcgctgcgctcggtcgttcggctgcggc
gagcggtatcagctcactcaaaggcggtaatacggttatccacagaatcaggggataacgcaggaaag
aacatgtgagcaaaaggccagcaaaaggccaggaaccgtaaaaaggccgcgttgctggcgtttttcca
taggctccgcccccctgacgagcatcacaaaaatcgacgctcaagtcagaggtggcgaaacccgacag
gactataaagataccaggcgtttccccctggaagctccctcgtgcgctctcctgttccgaccctgccg
cttaccggatacctgtccgcctttctcccttcgggaagcgtggcgctttctcatagctcacgctgtag
gtatctcagttcggtgtaggtcgttcgctccaagctgggctgtgtgcacgaaccccccgttcagcccg
accgctgcgccttatccggtaactatcgtcttgagtccaacccggtaagacacgacttatcgccactg
gcagcagccactggtaacaggattagcagagcgaggtatgtaggcggtgctacagagttcttgaagtg
gtggcctaactacggctacactagaagaacagtatttggtatctgcgctctgctgaagccagttacct
tcggaaaaagagttggtagctcttgatccggcaaacaaaccaccgctggtagcggtggtttttttgtt
tgcaagcagcagattacgcgcagaaaaaaaggatctcaagaagatcctttgatcttttctacggggtc
tgacgctcagtggaacgaaaactcacgttaagggattttggtcatgagattatcaaaaaggatcttca
cctagatccttttaaattaaaaatgaagttttaaatcaatctaaagtatatatgagtaaacttggtct
gacagttaccaatgcttaatcagtgaggcacctatctcagcgatctgtctatttcgttcatccatagt
tgcctgactccccgtcgtgtagataactacgatacgggagggcttaccatctggccccagtgctgcaa
tgataccgcgagacccacgctcaccggctccagatttatcagcaataaaccagccagccggaagggcc
gagcgcagaagtggtcctgcaactttatccgcctccatccagtctattaattgttgccgggaagctag
agtaagtagttcgccagttaatagtttgcgcaacgttgttgccattgctacaggcatcgtggtgtcac
gctcgtcgtttggtatggcttcattcagctccggttcccaacgatcaaggcgagttacatgatccccc
atgttgtgcaaaaaagcggttagctccttcggtcctccgatcgttgtcagaagtaagttggccgcagt
gttatcactcatggttatggcagcactgcataattctcttactgtcatgccatccgtaagatgctttt
ctgtgactggtgagtactcaaccaagtcattctgagaatagtgtatgcggcgaccgagttgctcttgc
ccggcgtcaatacgggataataccgcgccacatagcagaactttaaaagtgctcatcattggaaaacg
ttcttcggggcgaaaactctcaaggatcttaccgctgttgagatccagttcgatgtaacccactcgtg
cacccaactgatcttcagcatcttttactttcaccagcgtttctgggtgagcaaaaacaggaaggcaa
aatgccgcaaaaaagggaataagggcgacacggaaatgttgaatactcatactcttcctttttcaata
ttattgaagcatttatcagggttattgtctcatgagcggatacatatttgaatgtatttagaaaaata
aacaaataggggttccgcgcacatttccccgaaaagtgccacctgacgtc
pVP27-mRNA UTR basic
SEQ ID NO: 79
gacggatcgggagatctcccgatcccctatggtgcactctcagtacaatctgctctgatgccgcatag
ttaagccagtatctgctccctgcttgtgtgttggaggtcgctgagtagtgcgcgagcaaaatttaagc
tacaacaaggcaaggcttgaccgacaattgcatgaagaatctgcttagggttaggcgttttgcgctgc
ttcgcgatgtacgggccagatatacgcgttgacattgattattgactagttattaatagtaatcaatt
acggggtcattagttcatagcccatatatggagttccgcgttacataacttacggtaaatggcccgcc
tggctgaccgcccaacgacccccgcccattgacgtcaataatgacgtatgttcccatagtaacgccaa
tagggactttccattgacgtcaatgggtggagtatttacggtaaactgcccacttggcagtacatcaa
gtgtatcatatgccaagtacgccccctattgacgtcaatgacggtaaatggcccgcctggcattatgc
ccagtacatgaccttatgggactttcctacttggcagtacatctacgtattagtcatcgctattacca
tggtgatgcggttttggcagtacatcaatgggcgtggatagcggtttgactcacggggatttccaagt
ctccaccccattgacgtcaatgggagtttgttttggcaccaaaatcaacgggactttccaaaatgtcg
taacaactccgccccattgacgcaaatgggcggtaggcgtgtacggtgggaggtctatataagcagag
ctctctggctaactagagaacccactgcttactggcttatcgaaattaatacgactcactatagggag
acccaagctggctagccaccGAGAATAAACTAGTATTCTTCTGGTCCCCACAGACTCAGAGAGAACCC
GCCACCATggatccgagctcggtaccaagcttaagtttCTCGAGCTGGTACTGCATGCACGCAATGCT
AGCTGCCCCTTTCCCGTCCTGGGTACCCCGAGTCTCCCCCGACCTCGGGTCCCAGGTATGCTCCCACC
TCCACCTGCCCCACTCACCACCTCTGCTAGTTCCAGACACCTCCCAAGCACGCAGCAATGCAGCTCAA
AACGCTTAGCCTAGCCACACCCCCACGGGAAACAGCAGTGATTAACCTTTAGCAATAAACGAAAGTTT
AACTAAGCTATACTAACCCCAGGGTTGGTCAATTTCGTGCCAGCCACACCCTGGAGCTAGCaaaccgc
tgatcagcctcgactgtgccttctagttgccagccatctgttgtttgcccctcccccgtgccttcctt
gaccctggaaggtgccactcccactgtcctttcctaataaaatgaggaaattgcatcgcattgtctga
gtaggtgtcattctattctggggggtggggtggggcaggacagcaagggggaggattgggaagacaat
agcaggcatgctggggatgcggtgggctctatggcttctgaggcggaaagaaccagctggggctctag
ggggtatccccacgcgccctgtagcggcgcattaagcgcggcgggtgtggtggttacgcgcagcgtga
ccgctacacttgccagcgccctagcgcccgctcctttcgctttcttcccttcctttctcgccacgttc
gccggctttccccgtcaagctctaaatcgggggctccctttagggttccgatttagtgctttacggca
cctcgaccccaaaaaacttgattagggtgatggttcacgtagtgggccatcgccctgatagacggttt
ttcgccctttgacgttggagtccacgttctttaatagtggactcttgttccaaactggaacaacactc
aaccctatctcggtctattcttttgatttataagggattttgccgatttcggcctattggttaaaaaa
tgagctgatttaacaaaaatttaacgcgaattaattctgtggaatgtgtgtcagttagggtgtggaaa
gtccccaggctccccagcaggcagaagtatgcaaagcatgcatctcaattagtcagcaaccaggtgtg
gaaagtccccaggctccccagcaggcagaagtatgcaaagcatgcatctcaattagtcagcaaccata
gtcccgcccctaactccgcccatcccgcccctaactccgcccagttccgcccattctccgccccatgg
ctgactaattttttttatttatgcagaggccgaggccgcctctgcctctgagctattccagaagtagt
gaggaggcttttttggaggcctaggcttttgcaaaaagctcccgggagcttgtatatccattttcgga
tctgatcaagagacaggatgaggatcgtttcgcatgattgaacaagatggattgcacgcaggttctcc
ggccgcttgggtggagaggctattcggctatgactgggcacaacagacaatcggctgctctgatgccg
ccgtgttccggctgtcagcgcaggggcgcccggttctttttgtcaagaccgacctgtccggtgccctg
aatgaactgcaggacgaggcagcgcggctatcgtggctggccacgacgggcgttccttgcgcagctgt
gctcgacgttgtcactgaagcgggaagggactggctgctattgggcgaagtgccggggcaggatctcc
tgtcatctcaccttgctcctgccgagaaagtatccatcatggctgatgcaatgcggcggctgcatacg
cttgatccggctacctgcccattcgaccaccaagcgaaacatcgcatcgagcgagcacgtactcggat
ggaagccggtcttgtcgatcaggatgatctggacgaagagcatcaggggctcgcgccagccgaactgt
tcgccaggctcaaggcgcgcatgcccgacggcgaggatctcgtcgtgacccatggcgatgcctgcttg
ccgaatatcatggtggaaaatggccgcttttctggattcatcgactgtggccggctgggtgtggcgga
ccgctatcaggacatagcgttggctacccgtgatattgctgaagagcttggcggcgaatgggctgacc
gcttcctcgtgctttacggtatcgccgctcccgattcgcagcgcatcgccttctatcgccttcttgac
gagttcttctgagcgggactctggggttcgaaatgaccgaccaagcgacgcccaacctgccatcacga
gatttcgattccaccgccgccttctatgaaaggttgggcttcggaatcgttttccgggacgccggctg
gatgatcctccagcgcggggatctcatgctggagttcttcgcccaccccaacttgtttattgcagctt
ataatggttacaaataaagcaatagcatcacaaatttcacaaataaagcatttttttcactgcattct
agttgtggtttgtccaaactcatcaatgtatcttatcatgtctgtataccgtcgacctctagctagag
cttggcgtaatcatggtcatagctgtttcctgtgtgaaattgttatccgctcacaattccacacaaca
tacgagccggaagcataaagtgtaaagcctggggtgcctaatgagtgagctaactcacattaattgcg
ttgcgctcactgcccgctttccagtcgggaaacctgtcgtgccagctgcattaatgaatcggccaacg
cgcggggagaggcggtttgcgtattgggcgctcttccgcttcctcgctcactgactcgctgcgctcgg
tcgttcggctgcggcgagcggtatcagctcactcaaaggcggtaatacggttatccacagaatcaggg
gataacgcaggaaagaacatgtgagcaaaaggccagcaaaaggccaggaaccgtaaaaaggccgcgtt
gctggcgtttttccataggctccgcccccctgacgagcatcacaaaaatcgacgctcaagtcagaggt
ggcgaaacccgacaggactataaagataccaggcgtttccccctggaagctccctcgtgcgctctcct
gttccgaccctgccgcttaccggatacctgtccgcctttctcccttcgggaagcgtggcgctttctca
tagctcacgctgtaggtatctcagttcggtgtaggtcgttcgctccaagctgggctgtgtgcacgaac
cccccgttcagcccgaccgctgcgccttatccggtaactatcgtcttgagtccaacccggtaagacac
gacttatcgccactggcagcagccactggtaacaggattagcagagcgaggtatgtaggcggtgctac
agagttcttgaagtggtggcctaactacggctacactagaagaacagtatttggtatctgcgctctgc
tgaagccagttaccttcggaaaaagagttggtagctcttgatccggcaaacaaaccaccgctggtagc
ggtggtttttttgtttgcaagcagcagattacgcgcagaaaaaaaggatctcaagaagatcctttgat
cttttctacggggtctgacgctcagtggaacgaaaactcacgttaagggattttggtcatgagattat
caaaaaggatcttcacctagatccttttaaattaaaaatgaagttttaaatcaatctaaagtatatat
gagtaaacttggtctgacagttaccaatgcttaatcagtgaggcacctatctcagcgatctgtctatt
tcgttcatccatagttgcctgactccccgtcgtgtagataactacgatacgggagggcttaccatctg
gccccagtgctgcaatgataccgcgagacccacgctcaccggctccagatttatcagcaataaaccag
ccagccggaagggccgagcgcagaagtggtcctgcaactttatccgcctccatccagtctattaattg
ttgccgggaagctagagtaagtagttcgccagttaatagtttgcgcaacgttgttgccattgctacag
gcatcgtggtgtcacgctcgtcgtttggtatggcttcattcagctccggttcccaacgatcaaggcga
gttacatgatcccccatgttgtgcaaaaaagcggttagctccttcggtcctccgatcgttgtcagaag
taagttggccgcagtgttatcactcatggttatggcagcactgcataattctcttactgtcatgccat
ccgtaagatgcttttctgtgactggtgagtactcaaccaagtcattctgagaatagtgtatgcggcga
ccgagttgctcttgcccggcgtcaatacgggataataccgcgccacatagcagaactttaaaagtgct
catcattggaaaacgttcttcggggcgaaaactctcaaggatcttaccgctgttgagatccagttcga
tgtaacccactcgtgcacccaactgatcttcagcatcttttactttcaccagcgtttctgggtgagca
aaaacaggaaggcaaaatgccgcaaaaaagggaataagggcgacacggaaatgttgaatactcatact
cttcctttttcaatattattgaagcatttatcagggttattgtctcatgagcggatacatatttgaat
gtatttagaaaaataaacaaataggggttccgcgcacatttccccgaaaagtgccacctgacgtc
pVP29b-Indian_B.1.617_hexapro_UTR
SEQ ID NO: 80
gacggatcgggagatctcccgatcccctatggtgcactctcagtacaatctgctctgatgccgcatag
ttaagccagtatctgctccctgcttgtgtgttggaggtcgctgagtagtgcgcgagcaaaatttaagc
tacaacaaggcaaggcttgaccgacaattgcatgaagaatctgcttagggttaggcgttttgcgctgc
ttcgcgatgtacgggccagatatacgcgttgacattgattattgactagttattaatagtaatcaatt
acggggtcattagttcatagcccatatatggagttccgcgttacataacttacggtaaatggcccgcc
tggctgaccgcccaacgacccccgcccattgacgtcaataatgacgtatgttcccatagtaacgccaa
tagggactttccattgacgtcaatgggtggagtatttacggtaaactgcccacttggcagtacatcaa
gtgtatcatatgccaagtacgccccctattgacgtcaatgacggtaaatggcccgcctggcattatgc
ccagtacatgaccttatgggactttcctacttggcagtacatctacgtattagtcatcgctattacca
tggtgatgcggttttggcagtacatcaatgggcgtggatagcggtttgactcacggggatttccaagt
ctccaccccattgacgtcaatgggagtttgttttggcaccaaaatcaacgggactttccaaaatgtcg
taacaactccgccccattgacgcaaatgggcggtaggcgtgtacggtgggaggtctatataagcagag
ctctctggctaactagagaacccactgcttactggcttatcgaaattaatacgactcactatagggag
acccaagctggctagccaccGAGAATAAACTAGTATTCTTCTGGTCCCCACAGACTCAGAGAGAACCC
GCCACCATgTTTGTGTTCCTGGTGCTGCTGCCACTGGTGTCCAGCCAGTGTGTGAACCTGACCACCAG
GACCCAACTTCCTCCTGCCTACACCAACTCCTTCACCAGGGGAGTCTACTACCCTGACAAGGTGTTCA
GGTCCTCTGTGCTGCACAGCACCCAGGACCTGTTCCTGCCATTCTTCAGCAATGTGACCTGGTTCCAT
GCCATCCATGTGTCTGGCACCAATGGCACCAAGAGGTTTGACAACCCTGTGCTGCCATTCAATGATGG
AGTCTACTTTGCCAGCACAGAGAAGAGCAACATCATCAGGGGCTGGATTTTTGGCACCACCCTGGACA
GCAAGACCCAGTCCCTGCTGATTGTGAACAATGCCACCAATGTGGTGATTAAGGTGTGTGAGTTCCAG
TTCTGTAATGACCCATTCCTGGACGTCTACTACCACAAGAACAACAAGTCCTGGATGAAGTCTGAGTT
CAGGGTCTACTCCTCTGCCAACAACTGTACCTTTGAATATGTGAGCCAACCATTCCTGATGGACTTGG
AGGGCAAGCAGGGCAACTTCAAGAACCTGAGGGAGTTTGTGTTCAAGAACATTGATGGCTACTTCAAG
ATTTACAGCAAACACACACCAATCAACCTGGTGAGGGACCTGCCACAGGGCTTCTCTGCCTTGGAACC
ACTGGTGGACCTGCCAATTGGCATCAACATCACCAGGTTCCAGACCCTGCTGGCTCTGCACAGGTCCT
ACCTGACACCTGGAGACTCCTCCTCTGGCTGGACAGCAGGAGCAGCAGCCTACTATGTGGGCTACCTC
CAACCAAGGACCTTCCTGCTGAAATACAATGAGAATGGCACCATCACAGATGCTGTGGACTGTGCCCT
GGACCCACTGTCTGAGACCAAGTGTACCCTGAAATCCTTCACAGTGGAGAAGGGCATCTACCAGACCA
GCAACTTCAGGGTCCAACCAACAGAGAGCATTGTGAGGTTTCCAAACATCACCAACCTGTGTCCATTT
GGAGAGGTGTTCAATGCCACCAGGTTTGCCTCTGTCTATGCCTGGAACAGGAAGAGGATTAGCAACTG
TGTGGCTGACTACTCTGTGCTCTACAACTCTGCCTCCTTCAGCACCTTCAAGTGTTATGGAGTGAGCC
CAACCAAACTGAATGACCTGTGTTTCACCAATGTCTATGCTGACTCCTTTGTGATTAGGGGAGATGAG
GTGAGACAGATTGCCCCTGGACAAACAGGCAAGATTGCTGACTACAACTACAAACTGCCTGATGACTT
CACAGGCTGTGTGATTGCCTGGAACAGCAACAACCTGGACAGCAAGGTGGGAGGCAACTACAACTACA
GGTACAGACTGTTCAGGAAGAGCAACCTGAAACCATTTGAGAGGGACATCAGCACAGAGATTTACCAG
GCTGGCAGCACACCATGTAATGGAGTGCAGGGCTTCAACTGTTACTTTCCACTCCAATCCTATGGCTT
CCAACCAACCAATGGAGTGGGCTACCAACCATACAGGGTGGTGGTGCTGTCCTTTGAACTGCTCCATG
CCCCTGCCACAGTGTGTGGACCAAAGAAGAGCACCAACCTGGTGAAGAACAAGTGTGTGAACTTCAAC
TTCAATGGACTGACAGGCACAGGAGTGCTGACAGAGAGCAACAAGAAGTTCCTGCCATTCCAACAGTT
TGGCAGGGACATTGCTGACACCACAGATGCTGTGAGGGACCCACAGACCTTGGAGATTCTGGACATCA
CACCATGTTCCTTTGGAGGAGTGTCTGTGATTACACCTGGCACCAACACCAGCAACCAGGTGGCTGTG
CTCTACCAGGGAGTGAACTGTACTGAGGTGCCTGTGGCTATCCATGCTGACCAACTTACACCAACCTG
GAGGGTCTACAGCACAGGCAGCAATGTGTTCCAGACCAGGGCTGGCTGTCTGATTGGAGCAGAGCATG
TGAACAACTCCTATGAGTGTGACATCCCAATTGGAGCAGGCATCTGTGCCTCCTACCAGACCCAGACC
AACAGCAGGGGCTCTGCATCTTCTGTGGCAAGCCAGAGCATCATTGCCTACACAATGAGTCTGGGAGC
AGAGAACTCTGTGGCTTACAGCAACAACAGCATTGCCATCCCAACCAACTTCACCATCTCTGTGACCA
CAGAGATTCTGCCTGTGAGTATGACCAAGACCTCTGTGGACTGTACAATGTATATCTGTGGAGACAGC
ACAGAGTGTAGCAACCTGCTGCTCCAATATGGCTCCTTCTGTACCCAACTTAACAGGGCTCTGACAGG
CATTGCTGTGGAACAGGACAAGAACACACAGGAGGTGTTTGCCCAGGTGAAGCAGATTTACAAGACAC
CTCCAATCAAGGACTTTGGAGGCTTCAACTTCAGCCAGATTCTGCCTGACCCAAGCAAGCCAAGCAAG
AGGTCCCCTATTGAGGACCTGCTGTTCAACAAGGTGACCCTGGCTGATGCTGGCTTCATCAAGCAATA
TGGAGACTGTCTGGGAGACATTGCTGCCAGGGACCTGATTTGTGCCCAGAAGTTCAATGGACTGACAG
TGCTGCCTCCACTGCTGACAGATGAGATGATTGCCCAATACACCTCTGCCCTGCTGGCTGGCACCATC
ACCTCTGGCTGGACCTTTGGAGCAGGACCAGCCCTCCAAATCCCATTTCCAATGCAGATGGCTTACAG
GTTCAATGGCATTGGAGTGACCCAGAATGTGCTCTATGAGAACCAGAAACTGATTGCCAACCAGTTCA
ACTCTGCCATTGGCAAGATTCAGGACTCCCTGTCCAGCACACCATCTGCCCTGGGCAAACTCCAAGAT
GTGGTGAACCAGAATGCCCAGGCTCTGAACACCCTGGTGAAGCAACTTTCCAGCAACTTTGGAGCCAT
CTCCTCTGTGCTGAATGACATCCTGAGCAGACTGGACCCACCAGAGGCTGAGGTCCAGATTGACAGAC
TGATTACAGGCAGACTCCAATCCCTCCAAACCTATGTGACCCAACAACTTATCAGGGCTGCTGAGATT
AGGGCATCTGCCAACCTGGCTGCCACCAAGATGAGTGAGTGTGTGCTGGGACAAAGCAAGAGGGTGGA
CTTCTGTGGCAAGGGCTACCACCTGATGAGTTTTCCACAGTCTGCCCCTCATGGAGTGGTGTTCCTGC
ATGTGACCTATGTGCCTGCCCATGAGAAGAACTTCACCACAGCCCCTGCCATCTGCCATGATGGCAAG
GCTCACTTTCCAAGGGAGGGAGTGTTTGTGAGCAATGGCACCCACTGGTTTGTGACCCAGAGGAACTT
CTATGAACCACAGATTATCACCACAGACAACACCTTTGTGTCTGGCAACTGTGATGTGGTGATTGGCA
TTGTGAACAACACAGTCTATGACCCACTCCAACCTGAACTGGACTCCTTCAAGGAGGAACTGGACAAA
TACTTCAAGAACCACACCAGCCCTGATGTGGACCTGGGAGACATCTCTGGCATCAATGCCTCTGTGGT
GAACATCCAGAAGGAGATTGACAGACTGAATGAGGTGGCTAAGAACCTGAATGAGTCCCTGATTGACC
TCCAAGAACTGGGCAAATATGAACAATACATCAAGTGGCCATGGTACATCTGGCTGGGCTTCATTGCT
GGACTGATTGCCATTGTGATGGTGACCATAATGCTGTGTTGTATGACCTCCTGTTGTTCCTGTCTGAA
AGGCTGTTGTTCCTGTGGCTCCTGTTGTAAGTTTGATGAGGATGACTCTGAACCTGTGCTGAAAGGAG
TGAAACTGCACTACACCTGACTCGAGCTGGTACTGCATGCACGCAATGCTAGCTGCCCCTTTCCCGTC
CTGGGTACCCCGAGTCTCCCCCGACCTCGGGTCCCAGGTATGCTCCCACCTCCACCTGCCCCACTCAC
CACCTCTGCTAGTTCCAGACACCTCCCAAGCACGCAGCAATGCAGCTCAAAACGCTTAGCCTAGCCAC
ACCCCCACGGGAAACAGCAGTGATTAACCTTTAGCAATAAACGAAAGTTTAACTAAGCTATACTAACC
CCAGGGTTGGTCAATTTCGTGCCAGCCACACCCTGGAGCTAGCaaaccgctgatcagcctcgactgtg
ccttctagttgccagccatctgttgtttgcccctcccccgtgccttccttgaccctggaaggtgccac
tcccactgtcctttcctaataaaatgaggaaattgcatcgcattgtctgagtaggtgtcattctattc
tggggggtggggtggggcaggacagcaagggggaggattgggaagacaatagcaggcatgctggggat
gcggtgggctctatggcttctgaggcggaaagaaccagctggggctctagggggtatccccacgcgcc
ctgtagcggcgcattaagcgcggcgggtgtggtggttacgcgcagcgtgaccgctacacttgccagcg
ccctagcgcccgctcctttcgctttcttcccttcctttctcgccacgttcgccggctttccccgtcaa
gctctaaatcgggggctccctttagggttccgatttagtgctttacggcacctcgaccccaaaaaact
tgattagggtgatggttcacgtagtgggccatcgccctgatagacggtttttcgccctttgacgttgg
agtccacgttctttaatagtggactcttgttccaaactggaacaacactcaaccctatctcggtctat
tcttttgatttataagggattttgccgatttcggcctattggttaaaaaatgagctgatttaacaaaa
atttaacgcgaattaattctgtggaatgtgtgtcagttagggtgtggaaagtccccaggctccccagc
aggcagaagtatgcaaagcatgcatctcaattagtcagcaaccaggtgtggaaagtccccaggctccc
cagcaggcagaagtatgcaaagcatgcatctcaattagtcagcaaccatagtcccgcccctaactccg
cccatcccgcccctaactccgcccagttccgcccattctccgccccatggctgactaattttttttat
ttatgcagaggccgaggccgcctctgcctctgagctattccagaagtagtgaggaggcttttttggag
gcctaggcttttgcaaaaagctcccgggagcttgtatatccattttcggatctgatcaagagacagga
tgaggatcgtttcgcatgattgaacaagatggattgcacgcaggttctccggccgcttgggtggagag
gctattcggctatgactgggcacaacagacaatcggctgctctgatgccgccgtgttccggctgtcag
cgcaggggcgcccggttctttttgtcaagaccgacctgtccggtgccctgaatgaactgcaggacgag
gcagcgcggctatcgtggctggccacgacgggcgttccttgcgcagctgtgctcgacgttgtcactga
agcgggaagggactggctgctattgggcgaagtgccggggcaggatctcctgtcatctcaccttgctc
ctgccgagaaagtatccatcatggctgatgcaatgcggcggctgcatacgcttgatccggctacctgc
ccattcgaccaccaagcgaaacatcgcatcgagcgagcacgtactcggatggaagccggtcttgtcga
tcaggatgatctggacgaagagcatcaggggctcgcgccagccgaactgttcgccaggctcaaggcgc
gcatgcccgacggcgaggatctcgtcgtgacccatggcgatgcctgcttgccgaatatcatggtggaa
aatggccgcttttctggattcatcgactgtggccggctgggtgtggcggaccgctatcaggacatagc
gttggctacccgtgatattgctgaagagcttggcggcgaatgggctgaccgcttcctcgtgctttacg
gtatcgccgctcccgattcgcagcgcatcgccttctatcgccttcttgacgagttcttctgagcggga
ctctggggttcgaaatgaccgaccaagcgacgcccaacctgccatcacgagatttcgattccaccgcc
gccttctatgaaaggttgggcttcggaatcgttttccgggacgccggctggatgatcctccagcgcgg
ggatctcatgctggagttcttcgcccaccccaacttgtttattgcagcttataatggttacaaataaa
gcaatagcatcacaaatttcacaaataaagcatttttttcactgcattctagttgtggtttgtccaaa
ctcatcaatgtatcttatcatgtctgtataccgtcgacctctagctagagcttggcgtaatcatggtc
atagctgtttcctgtgtgaaattgttatccgctcacaattccacacaacatacgagccggaagcataa
agtgtaaagcctggggtgcctaatgagtgagctaactcacattaattgcgttgcgctcactgcccgct
ttccagtcgggaaacctgtcgtgccagctgcattaatgaatcggccaacgcgcggggagaggcggttt
gcgtattgggcgctcttccgcttcctcgctcactgactcgctgcgctcggtcgttcggctgcggcgag
cggtatcagctcactcaaaggcggtaatacggttatccacagaatcaggggataacgcaggaaagaac
atgtgagcaaaaggccagcaaaaggccaggaaccgtaaaaaggccgcgttgctggcgtttttccatag
gctccgcccccctgacgagcatcacaaaaatcgacgctcaagtcagaggtggcgaaacccgacaggac
tataaagataccaggcgtttccccctggaagctccctcgtgcgctctcctgttccgaccctgccgctt
accggatacctgtccgcctttctcccttcgggaagcgtggcgctttctcatagctcacgctgtaggta
tctcagttcggtgtaggtcgttcgctccaagctgggctgtgtgcacgaaccccccgttcagcccgacc
gctgcgccttatccggtaactatcgtcttgagtccaacccggtaagacacgacttatcgccactggca
gcagccactggtaacaggattagcagagcgaggtatgtaggcggtgctacagagttcttgaagtggtg
gcctaactacggctacactagaagaacagtatttggtatctgcgctctgctgaagccagttaccttcg
gaaaaagagttggtagctcttgatccggcaaacaaaccaccgctggtagcggtggtttttttgtttgc
aagcagcagattacgcgcagaaaaaaaggatctcaagaagatcctttgatcttttctacggggtctga
cgctcagtggaacgaaaactcacgttaagggattttggtcatgagattatcaaaaaggatcttcacct
agatccttttaaattaaaaatgaagttttaaatcaatctaaagtatatatgagtaaacttggtctgac
agttaccaatgcttaatcagtgaggcacctatctcagcgatctgtctatttcgttcatccatagttgc
ctgactccccgtcgtgtagataactacgatacgggagggcttaccatctggccccagtgctgcaatga
taccgcgagacccacgctcaccggctccagatttatcagcaataaaccagccagccggaagggccgag
cgcagaagtggtcctgcaactttatccgcctccatccagtctattaattgttgccgggaagctagagt
aagtagttcgccagttaatagtttgcgcaacgttgttgccattgctacaggcatcgtggtgtcacgct
cgtcgtttggtatggcttcattcagctccggttcccaacgatcaaggcgagttacatgatcccccatg
ttgtgcaaaaaagcggttagctccttcggtcctccgatcgttgtcagaagtaagttggccgcagtgtt
atcactcatggttatggcagcactgcataattctcttactgtcatgccatccgtaagatgcttttctg
tgactggtgagtactcaaccaagtcattctgagaatagtgtatgcggcgaccgagttgctcttgcccg
gcgtcaatacgggataataccgcgccacatagcagaactttaaaagtgctcatcattggaaaacgttc
ttcggggcgaaaactctcaaggatcttaccgctgttgagatccagttcgatgtaacccactcgtgcac
ccaactgatcttcagcatcttttactttcaccagcgtttctgggtgagcaaaaacaggaaggcaaaat
gccgcaaaaaagggaataagggcgacacggaaatgttgaatactcatactcttcctttttcaatatta
ttgaagcatttatcagggttattgtctcatgagcggatacatatttgaatgtatttagaaaaataaac
aaataggggttccgcgcacatttccccgaaaagtgccacctgacgtc
pVP33-SARS-CoV-UTR
SEQ ID NO: 81
gacggatcgggagatctcccgatcccctatggtgcactctcagtacaatctgctctgatgccgcatag
ttaagccagtatctgctccctgcttgtgtgttggaggtcgctgagtagtgcgcgagcaaaatttaagc
tacaacaaggcaaggcttgaccgacaattgcatgaagaatctgcttagggttaggcgttttgcgctgc
ttcgcgatgtacgggccagatatacgcgttgacattgattattgactagttattaatagtaatcaatt
acggggtcattagttcatagcccatatatggagttccgcgttacataacttacggtaaatggcccgcc
tggctgaccgcccaacgacccccgcccattgacgtcaataatgacgtatgttcccatagtaacgccaa
tagggactttccattgacgtcaatgggtggagtatttacggtaaactgcccacttggcagtacatcaa
gtgtatcatatgccaagtacgccccctattgacgtcaatgacggtaaatggcccgcctggcattatgc
ccagtacatgaccttatgggactttcctacttggcagtacatctacgtattagtcatcgctattacca
tggtgatgcggttttggcagtacatcaatgggcgtggatagcggtttgactcacggggatttccaagt
ctccaccccattgacgtcaatgggagtttgttttggcaccaaaatcaacgggactttccaaaatgtcg
taacaactccgccccattgacgcaaatgggcggtaggcgtgtacggtgggaggtctatataagcagag
ctctctggctaactagagaacccactgcttactggcttatcgaaattaatacgactcactatagggag
acccaagctggctagccaccGAGAATAAACTAGTATTCTTCTGGTCCCCACAGACTCAGAGAGAACCC
GCCACCATgTTCATCTTCCTGCTGTTCCTGACCCTGACCTCTGGCTCTGACCTGGACAGGTGTACCAC
CTTTGATGATGTCCAGGCTCCAAACTACACCCAACACACCTCCAGTATGAGGGGAGTCTACTACCCTG
ATGAGATTTTCAGGTCTGACACCCTCTACCTGACCCAGGACCTGTTCCTGCCATTCTACAGCAATGTG
ACAGGCTTCCACACCATCAACCACACCTTTGACAACCCTGTGATTCCATTCAAGGATGGCATCTACTT
TGCTGCCACAGAGAAGAGCAATGTGGTGAGGGGCTGGGTGTTTGGCAGCACAATGAACAACAAGAGCC
AGTCTGTGATTATCATCAACAACAGCACCAATGTGGTGATTAGGGCTTGTAACTTTGAACTGTGTGAC
AACCCATTCTTTGCTGTGAGCAAGCCTATGGGCACCCAGACCCACACAATGATTTTTGACAATGCCTT
CAACTGTACCTTTGAATACATCTCTGATGCCTTCTCCCTGGATGTGTCTGAGAAGTCTGGCAACTTCA
AACACCTGAGGGAGTTTGTGTTCAAGAACAAGGATGGCTTCCTCTATGTCTACAAGGGCTACCAACCA
ATTGATGTGGTGAGGGACCTGCCATCTGGCTTCAACACCCTGAAACCAATCTTCAAACTGCCACTGGG
CATCAACATCACCAACTTCAGGGCTATCCTGACAGCCTTCAGCCCTGCCCAGGACACCTGGGGCACCT
CTGCTGCTGCCTACTTTGTGGGCTACCTGAAACCAACCACCTTTATGCTGAAATATGATGAGAATGGC
ACCATCACAGATGCTGTGGACTGTAGCCAGAACCCACTGGCTGAACTGAAATGTTCTGTGAAGTCCTT
TGAGATTGACAAGGGCATCTACCAGACCAGCAACTTCAGGGTGGTGCCATCTGGAGATGTGGTGAGGT
TTCCAAACATCACCAACCTGTGTCCATTTGGAGAGGTGTTCAATGCCACCAAGTTTCCATCTGTCTAT
GCCTGGGAGAGGAAGAAGATTAGCAACTGTGTGGCTGACTACTCTGTGCTCTACAACAGCACCTTCTT
CAGCACCTTCAAGTGTTATGGAGTGTCTGCCACCAAACTGAATGACCTGTGTTTCAGCAATGTCTATG
CTGACTCCTTTGTGGTGAAGGGAGATGATGTGAGACAGATTGCCCCTGGACAAACAGGAGTGATTGCT
GACTACAACTACAAACTGCCTGATGACTTTATGGGCTGTGTGCTGGCTTGGAACACCAGGAACATTGA
TGCCACCAGCACAGGCAACTACAACTACAAATACAGATACCTGAGACATGGCAAACTGAGACCATTTG
AGAGGGACATCAGCAATGTGCCATTCAGCCCTGATGGCAAGCCATGTACTCCTCCTGCCCTGAACTGT
TACTGGCCACTGAATGACTATGGCTTCTACACCACCACAGGCATTGGCTACCAACCATACAGGGTGGT
GGTGCTGTCCTTTGAACTGCTGAATGCCCCTGCCACAGTGTGTGGACCAAAACTGAGCACAGACCTGA
TTAAGAACCAGTGTGTGAACTTCAACTTCAATGGACTGACAGGCACAGGAGTGCTGACACCATCCAGC
AAGAGGTTCCAACCATTCCAACAGTTTGGCAGGGATGTGTCTGACTTCACAGACTCTGTGAGGGACCC
AAAGACCTCTGAGATTCTGGACATCAGCCCATGTTCCTTTGGAGGAGTGTCTGTGATTACACCTGGCA
CCAATGCCTCCTCTGAGGTGGCTGTGCTCTACCAGGATGTGAACTGTACTGATGTGAGCACAGCCATC
CATGCTGACCAACTTACACCTGCCTGGAGGATTTACAGCACAGGCAACAATGTGTTCCAGACCCAGGC
TGGCTGTCTGATTGGAGCAGAGCATGTGGACACCTCCTATGAGTGTGACATCCCAATTGGAGCAGGCA
TCTGTGCCTCCTACCACACAGTGTCCCTGCTGAGGAGCACCAGCCAGAAGAGCATTGTGGCTTACACA
ATGAGTCTGGGAGCAGACTCCAGCATTGCCTACAGCAACAACACCATTGCCATCCCAACCAACTTCAG
CATCAGCATCACCACAGAGGTGATGCCTGTGAGTATGGCTAAGACCTCTGTGGACTGTAATATGTATA
TCTGTGGAGACAGCACAGAGTGTGCCAACCTGCTGCTCCAATATGGCTCCTTCTGTACCCAACTTAAC
AGGGCTCTGTCTGGCATTGCTGCTGAACAGGACAGGAACACCAGGGAGGTGTTTGCCCAGGTGAAGCA
GATGTATAAGACACCAACCCTGAAATACTTTGGAGGCTTCAACTTCAGCCAGATTCTGCCTGACCCAC
TGAAACCAACCAAGAGGTCCTTCATTGAGGACCTGCTGTTCAACAAGGTGACCCTGGCTGATGCTGGC
TTTATGAAGCAATATGGAGAGTGTCTGGGAGACATCAATGCCAGGGACCTGATTTGTGCCCAGAAGTT
CAATGGACTGACAGTGCTGCCTCCACTGCTGACAGATGATATGATTGCTGCCTACACAGCAGCCCTGG
TGTCTGGCACAGCCACAGCAGGCTGGACCTTTGGAGCAGGAGCAGCCCTCCAAATCCCATTTGCTATG
CAGATGGCTTACAGGTTCAATGGCATTGGAGTGACCCAGAATGTGCTCTATGAGAACCAGAAGCAGAT
TGCCAACCAGTTCAACAAGGCTATCAGCCAGATTCAGGAGTCCCTGACCACCACCAGCACAGCCCTGG
GCAAACTCCAAGATGTGGTGAACCAGAATGCCCAGGCTCTGAACACCCTGGTGAAGCAACTTTCCAGC
AACTTTGGAGCCATCTCCTCTGTGCTGAATGACATCCTGAGCAGACTGGACAAGGTGGAGGCTGAGGT
CCAGATTGACAGACTGATTACAGGCAGACTCCAATCCCTCCAAACCTATGTGACCCAACAACTTATCA
GGGCTGCTGAGATTAGGGCATCTGCCAACCTGGCTGCCACCAAGATGAGTGAGTGTGTGCTGGGACAA
AGCAAGAGGGTGGACTTCTGTGGCAAGGGCTACCACCTGATGAGTTTTCCACAGGCTGCCCCTCATGG
AGTGGTGTTCCTGCATGTGACCTATGTGCCAAGCCAGGAGAGGAACTTCACCACAGCCCCTGCCATCT
GCCATGAGGGCAAGGCTTACTTTCCAAGGGAGGGAGTGTTTGTGTTCAATGGCACCTCCTGGTTCATC
ACCCAGAGGAACTTCTTCAGCCCACAGATTATCACCACAGACAACACCTTTGTGTCTGGCAACTGTGA
TGTGGTGATTGGCATCATCAACAACACAGTCTATGACCCACTCCAACCTGAACTGGACTCCTTCAAGG
AGGAACTGGACAAATACTTCAAGAACCACACCAGCCCTGATGTGGACCTGGGAGACATCTCTGGCATC
AATGCCTCTGTGGTGAACATCCAGAAGGAGATTGACAGACTGAATGAGGTGGCTAAGAACCTGAATGA
GTCCCTGATTGACCTCCAAGAACTGGGCAAATATGAACAATACATCAAGTGGCCATGGTATGTGTGGC
TGGGCTTCATTGCTGGACTGATTGCCATTGTGATGGTGACCATCCTGCTGTGTTGTATGACCTCCTGT
TGTTCCTGTCTGAAAGGAGCCTGTTCCTGTGGCTCCTGTTGTAAGTTTGATGAGGATGACTCTGAACC
TGTGCTGAAAGGAGTGAAACTGCACTACACCTAACTCGAGCTGGTACTGCATGCACGCAATGCTAGCT
GCCCCTTTCCCGTCCTGGGTACCCCGAGTCTCCCCCGACCTCGGGTCCCAGGTATGCTCCCACCTCCA
CCTGCCCCACTCACCACCTCTGCTAGTTCCAGACACCTCCCAAGCACGCAGCAATGCAGCTCAAAACG
CTTAGCCTAGCCACACCCCCACGGGAAACAGCAGTGATTAACCTTTAGCAATAAACGAAAGTTTAACT
AAGCTATACTAACCCCAGGGTTGGTCAATTTCGTGCCAGCCACACCCTGGAGCTAGCaaaccgctgat
cagcctcgactgtgccttctagttgccagccatctgttgtttgcccctcccccgtgccttccttgacc
ctggaaggtgccactcccactgtcctttcctaataaaatgaggaaattgcatcgcattgtctgagtag
gtgtcattctattctggggggtggggtggggcaggacagcaagggggaggattgggaagacaatagca
ggcatgctggggatgcggtgggctctatggcttctgaggcggaaagaaccagctggggctctaggggg
tatccccacgcgccctgtagcggcgcattaagcgcggcgggtgtggtggttacgcgcagcgtgaccgc
tacacttgccagcgccctagcgcccgctcctttcgctttcttcccttcctttctcgccacgttcgccg
gctttccccgtcaagctctaaatcgggggctccctttagggttccgatttagtgctttacggcacctc
gaccccaaaaaacttgattagggtgatggttcacgtagtgggccatcgccctgatagacggtttttcg
ccctttgacgttggagtccacgttctttaatagtggactcttgttccaaactggaacaacactcaacc
ctatctcggtctattcttttgatttataagggattttgccgatttcggcctattggttaaaaaatgag
ctgatttaacaaaaatttaacgcgaattaattctgtggaatgtgtgtcagttagggtgtggaaagtcc
ccaggctccccagcaggcagaagtatgcaaagcatgcatctcaattagtcagcaaccaggtgtggaaa
gtccccaggctccccagcaggcagaagtatgcaaagcatgcatctcaattagtcagcaaccatagtcc
cgcccctaactccgcccatcccgcccctaactccgcccagttccgcccattctccgccccatggctga
ctaattttttttatttatgcagaggccgaggccgcctctgcctctgagctattccagaagtagtgagg
aggcttttttggaggcctaggcttttgcaaaaagctcccgggagcttgtatatccattttcggatctg
atcaagagacaggatgaggatcgtttcgcatgattgaacaagatggattgcacgcaggttctccggcc
gcttgggtggagaggctattcggctatgactgggcacaacagacaatcggctgctctgatgccgccgt
gttccggctgtcagcgcaggggcgcccggttctttttgtcaagaccgacctgtccggtgccctgaatg
aactgcaggacgaggcagcgcggctatcgtggctggccacgacgggcgttccttgcgcagctgtgctc
gacgttgtcactgaagcgggaagggactggctgctattgggcgaagtgccggggcaggatctcctgtc
atctcaccttgctcctgccgagaaagtatccatcatggctgatgcaatgcggcggctgcatacgcttg
atccggctacctgcccattcgaccaccaagcgaaacatcgcatcgagcgagcacgtactcggatggaa
gccggtcttgtcgatcaggatgatctggacgaagagcatcaggggctcgcgccagccgaactgttcgc
caggctcaaggcgcgcatgcccgacggcgaggatctcgtcgtgacccatggcgatgcctgcttgccga
atatcatggtggaaaatggccgcttttctggattcatcgactgtggccggctgggtgtggcggaccgc
tatcaggacatagcgttggctacccgtgatattgctgaagagcttggcggcgaatgggctgaccgctt
cctcgtgctttacggtatcgccgctcccgattcgcagcgcatcgccttctatcgccttcttgacgagt
tcttctgagcgggactctggggttcgaaatgaccgaccaagcgacgcccaacctgccatcacgagatt
tcgattccaccgccgccttctatgaaaggttgggcttcggaatcgttttccgggacgccggctggatg
atcctccagcgcggggatctcatgctggagttcttcgcccaccccaacttgtttattgcagcttataa
tggttacaaataaagcaatagcatcacaaatttcacaaataaagcatttttttcactgcattctagtt
gtggtttgtccaaactcatcaatgtatcttatcatgtctgtataccgtcgacctctagctagagcttg
gcgtaatcatggtcatagctgtttcctgtgtgaaattgttatccgctcacaattccacacaacatacg
agccggaagcataaagtgtaaagcctggggtgcctaatgagtgagctaactcacattaattgcgttgc
gctcactgcccgctttccagtcgggaaacctgtcgtgccagctgcattaatgaatcggccaacgcgcg
gggagaggcggtttgcgtattgggcgctcttccgcttcctcgctcactgactcgctgcgctcggtcgt
tcggctgcggcgagcggtatcagctcactcaaaggcggtaatacggttatccacagaatcaggggata
acgcaggaaagaacatgtgagcaaaaggccagcaaaaggccaggaaccgtaaaaaggccgcgttgctg
gcgtttttccataggctccgcccccctgacgagcatcacaaaaatcgacgctcaagtcagaggtggcg
aaacccgacaggactataaagataccaggcgtttccccctggaagctccctcgtgcgctctcctgttc
cgaccctgccgcttaccggatacctgtccgcctttctcccttcgggaagcgtggcgctttctcatagc
tcacgctgtaggtatctcagttcggtgtaggtcgttcgctccaagctgggctgtgtgcacgaaccccc
cgttcagcccgaccgctgcgccttatccggtaactatcgtcttgagtccaacccggtaagacacgact
tatcgccactggcagcagccactggtaacaggattagcagagcgaggtatgtaggcggtgctacagag
ttcttgaagtggtggcctaactacggctacactagaagaacagtatttggtatctgcgctctgctgaa
gccagttaccttcggaaaaagagttggtagctcttgatccggcaaacaaaccaccgctggtagcggtg
gtttttttgtttgcaagcagcagattacgcgcagaaaaaaaggatctcaagaagatcctttgatcttt
tctacggggtctgacgctcagtggaacgaaaactcacgttaagggattttggtcatgagattatcaaa
aaggatcttcacctagatccttttaaattaaaaatgaagttttaaatcaatctaaagtatatatgagt
aaacttggtctgacagttaccaatgcttaatcagtgaggcacctatctcagcgatctgtctatttcgt
tcatccatagttgcctgactccccgtcgtgtagataactacgatacgggagggcttaccatctggccc
cagtgctgcaatgataccgcgagacccacgctcaccggctccagatttatcagcaataaaccagccag
ccggaagggccgagcgcagaagtggtcctgcaactttatccgcctccatccagtctattaattgttgc
cgggaagctagagtaagtagttcgccagttaatagtttgcgcaacgttgttgccattgctacaggcat
cgtggtgtcacgctcgtcgtttggtatggcttcattcagctccggttcccaacgatcaaggcgagtta
catgatcccccatgttgtgcaaaaaagcggttagctccttcggtcctccgatcgttgtcagaagtaag
ttggccgcagtgttatcactcatggttatggcagcactgcataattctcttactgtcatgccatccgt
aagatgcttttctgtgactggtgagtactcaaccaagtcattctgagaatagtgtatgcggcgaccga
gttgctcttgcccggcgtcaatacgggataataccgcgccacatagcagaactttaaaagtgctcatc
attggaaaacgttcttcggggcgaaaactctcaaggatcttaccgctgttgagatccagttcgatgta
acccactcgtgcacccaactgatcttcagcatcttttactttcaccagcgtttctgggtgagcaaaaa
caggaaggcaaaatgccgcaaaaaagggaataagggcgacacggaaatgttgaatactcatactcttc
ctttttcaatattattgaagcatttatcagggttattgtctcatgagcggatacatatttgaatgtat
ttagaaaaataaacaaataggggttccgcgcacatttccccgaaaagtgccacctgacgtc
pVP39_SARS-CoV-2-UTR-spike_delta_HexaPro_Circular
SEQ ID NO: 82
gacggatcgggagatctcccgatcccctatggtgcactctcagtacaatctgctctgatgccgcatag
ttaagccagtatctgctccctgcttgtgtgttggaggtcgctgagtagtgcgcgagcaaaatttaagc
tacaacaaggcaaggcttgaccgacaattgcatgaagaatctgcttagggttaggcgttttgcgctgc
ttcgcgatgtacgggccagatatacgcgttgacattgattattgactagttattaatagtaatcaatt
acggggtcattagttcatagcccatatatggagttccgcgttacataacttacggtaaatggcccgcc
tggctgaccgcccaacgacccccgcccattgacgtcaataatgacgtatgttcccatagtaacgccaa
tagggactttccattgacgtcaatgggtggagtatttacggtaaactgcccacttggcagtacatcaa
gtgtatcatatgccaagtacgccccctattgacgtcaatgacggtaaatggcccgcctggcattatgc
ccagtacatgaccttatgggactttcctacttggcagtacatctacgtattagtcatcgctattacca
tggtgatgcggttttggcagtacatcaatgggcgtggatagcggtttgactcacggggatttccaagt
ctccaccccattgacgtcaatgggagtttgttttggcaccaaaatcaacgggactttccaaaatgtcg
taacaactccgccccattgacgcaaatgggcggtaggcgtgtacggtgggaggtctatataagcagag
ctctctggctaactagagaacccactgcttactggcttatcgaaattaatacgactcactatagggag
acccaagctggctagccaccGAGAATAAACTAGTATTCTTCTGGTCCCCACAGACTCAGAGAGAACCC
GCCACCATgTTTGTGTTCCTGGTGCTGCTGCCACTGGTGTCCAGCCAGTGTGTGAACCTGAGGACCAG
GACCCAACTTCCTCCTGCCTACACCAACTCCTTCACCAGGGGAGTCTACTACCCTGACAAGGTGTTCA
GGTCCTCTGTGCTGCACAGCACCCAGGACCTGTTCCTGCCATTCTTCAGCAATGTGACCTGGTTCCAT
GCCATCCATGTGTCTGGCACCAATGGCACCAAGAGGTTTGACAACCCTGTGCTGCCATTCAATGATGG
AGTCTACTTTGCCAGCACAGAGAAGAGCAACATCATCAGGGGCTGGATTTTTGGCACCACCCTGGACA
GCAAGACCCAGTCCCTGCTGATTGTGAACAATGCCACCAATGTGGTGATTAAGGTGTGTGAGTTCCAG
TTCTGTAATGACCCATTCCTGGACGTCTACTACCACAAGAACAACAAGTCCTGGATGGAGTCTGGCGT
CTACTCCTCTGCCAACAACTGTACCTTTGAATATGTGAGCCAACCATTCCTGATGGACTTGGAGGGCA
AGCAGGGCAACTTCAAGAACCTGAGGGAGTTTGTGTTCAAGAACATTGATGGCTACTTCAAGATTTAC
AGCAAACACACACCAATCAACCTGGTGAGGGACCTGCCACAGGGCTTCTCTGCCTTGGAACCACTGGT
GGACCTGCCAATTGGCATCAACATCACCAGGTTCCAGACCCTGCTGGCTCTGCACAGGTCCTACCTGA
CACCTGGAGACTCCTCCTCTGGCTGGACAGCAGGAGCAGCAGCCTACTATGTGGGCTACCTCCAACCA
AGGACCTTCCTGCTGAAATACAATGAGAATGGCACCATCACAGATGCTGTGGACTGTGCCCTGGACCC
ACTGTCTGAGACCAAGTGTACCCTGAAATCCTTCACAGTGGAGAAGGGCATCTACCAGACCAGCAACT
TCAGGGTCCAACCAACAGAGAGCATTGTGAGGTTTCCAAACATCACCAACCTGTGTCCATTTGGAGAG
GTGTTCAATGCCACCAGGTTTGCCTCTGTCTATGCCTGGAACAGGAAGAGGATTAGCAACTGTGTGGC
TGACTACTCTGTGCTCTACAACTCTGCCTCCTTCAGCACCTTCAAGTGTTATGGAGTGAGCCCAACCA
AACTGAATGACCTGTGTTTCACCAATGTCTATGCTGACTCCTTTGTGATTAGGGGAGATGAGGTGAGA
CAGATTGCCCCTGGACAAACAGGCAAGATTGCTGACTACAACTACAAACTGCCTGATGACTTCACAGG
CTGTGTGATTGCCTGGAACAGCAACAACCTGGACAGCAAGGTGGGAGGCAACTACAACTACAGGTACA
GACTGTTCAGGAAGAGCAACCTGAAACCATTTGAGAGGGACATCAGCACAGAGATTTACCAGGCTGGC
AGCAAGCCATGTAATGGAGTGGAGGGCTTCAACTGTTACTTTCCACTCCAATCCTATGGCTTCCAACC
AACCAATGGAGTGGGCTACCAACCATACAGGGTGGTGGTGCTGTCCTTTGAACTGCTCCATGCCCCTG
CCACAGTGTGTGGACCAAAGAAGAGCACCAACCTGGTGAAGAACAAGTGTGTGAACTTCAACTTCAAT
GGACTGACAGGCACAGGAGTGCTGACAGAGAGCAACAAGAAGTTCCTGCCATTCCAACAGTTTGGCAG
GGACATTGCTGACACCACAGATGCTGTGAGGGACCCACAGACCTTGGAGATTCTGGACATCACACCAT
GTTCCTTTGGAGGAGTGTCTGTGATTACACCTGGCACCAACACCAGCAACCAGGTGGCTGTGCTCTAC
CAGGGCGTGAACTGTACTGAGGTGCCTGTGGCTATCCATGCTGACCAACTTACACCAACCTGGAGGGT
CTACAGCACAGGAAGCAACGTGTTCCAGACCAGGGCTGGCTGTCTGATTGGAGCAGAGCATGTGAACA
ACTCCTATGAGTGTGACATCCCAATTGGAGCAGGCATCTGTGCCTCCTACCAGACCCAGACCAACAGC
AGGGGCTCTGCATCTTCTGTGGCAAGCCAGAGCATCATTGCCTACACAATGAGTCTGGGAGCAGAGAA
CTCTGTGGCTTACAGCAACAACAGCATTGCCATCCCAACCAACTTCACCATCTCTGTGACCACAGAGA
TTCTGCCTGTGAGTATGACCAAGACCTCTGTGGACTGTACAATGTATATCTGTGGAGACAGCACAGAG
TGTAGCAACCTGCTGCTCCAATATGGCTCCTTCTGTACCCAACTTAACAGGGCTCTGACAGGCATTGC
TGTGGAACAGGACAAGAACACCCAGGAGGTGTTTGCCCAGGTGAAGCAGATTTACAAGACACCTCCAA
TCAAGGACTTTGGAGGCTTCAACTTCAGCCAGATTCTGCCTGACCCAAGCAAGCCAAGCAAGAGGTCC
CCTATTGAGGACCTGCTGTTCAACAAGGTGACCCTGGCTGATGCTGGCTTCATCAAGCAATATGGAGA
CTGTCTGGGAGACATTGCCGCCAGGGACCTGATTTGTGCCCAGAAGTTCAATGGACTGACAGTGCTGC
CTCCACTGCTGACAGATGAGATGATTGCCCAATACACCTCTGCCCTGCTGGCTGGCACCATCACCTCT
GGCTGGACCTTTGGAGCAGGACCAGCCCTCCAAATCCCATTTCCAATGCAGATGGCTTACAGGTTCAA
TGGCATTGGAGTGACCCAGAATGTGCTCTATGAGAACCAGAAACTGATTGCCAACCAGTTCAACTCTG
CCATTGGCAAGATTCAGGACTCCCTGTCCAGCACACCATCTGCCCTGGGCAAACTCCAAAACGTGGTG
AACCAGAATGCCCAGGCTCTGAACACCCTGGTGAAGCAACTTTCCAGCAACTTTGGAGCCATCTCCTC
TGTGCTGAATGACATCCTGAGCAGACTGGACCCACCAGAGGCTGAGGTCCAGATTGACAGACTGATTA
CAGGCAGACTCCAATCCCTCCAAACCTATGTGACCCAACAACTTATCAGGGCTGCTGAGATTAGGGCA
TCTGCCAACCTGGCTGCCACCAAGATGAGTGAGTGTGTGCTGGGACAAAGCAAGAGGGTGGACTTCTG
TGGCAAGGGCTACCACCTGATGAGTTTTCCACAGTCTGCCCCTCATGGAGTGGTGTTCCTGCATGTGA
CCTATGTGCCTGCCCAGGAGAAGAACTTCACCACAGCCCCTGCCATCTGCCATGATGGCAAGGCTCAC
TTTCCAAGGGAGGGAGTGTTTGTGAGCAATGGCACCCACTGGTTTGTGACCCAGAGGAACTTCTATGA
ACCACAGATTATCACCACAGACAACACCTTTGTGTCTGGCAACTGTGATGTGGTGATTGGCATTGTGA
ACAACACAGTCTATGACCCACTCCAACCTGAACTGGACTCCTTCAAGGAGGAACTGGACAAATACTTC
AAGAACCACACCAGCCCTGATGTGGACCTGGGAGACATCTCTGGCATCAATGCCTCTGTGGTGAACAT
CCAGAAGGAGATTGACAGACTGAATGAGGTGGCTAAGAACCTGAATGAGTCCCTGATTGACCTCCAAG
AACTGGGCAAATATGAACAATACATCAAGTGGCCATGGTACATCTGGCTGGGCTTCATTGCTGGACTG
ATTGCCATTGTGATGGTGACCATAATGCTGTGTTGTATGACCTCCTGTTGTTCCTGTCTGAAAGGCTG
TTGTTCCTGTGGCTCCTGTTGTAAGTTTGATGAGGATGACTCTGAACCTGTGCTGAAAGGAGTGAAAC
TGCACTACACCTGACTCGAGCTGGTACTGCATGCACGCAATGCTAGCTGCCCCTTTCCCGTCCTGGGT
ACCCCGAGTCTCCCCCGACCTCGGGTCCCAGGTATGCTCCCACCTCCACCTGCCCCACTCACCACCTC
TGCTAGTTCCAGACACCTCCCAAGCACGCAGCAATGCAGCTCAAAACGCTTAGCCTAGCCACACCCCC
ACGGGAAACAGCAGTGATTAACCTTTAGCAATAAACGAAAGTTTAACTAAGCTATACTAACCCCAGGG
TTGGTCAATTTCGTGCCAGCCACACCCTGGAGCTAGCaaaccgctgatcagcctcgactgtgccttct
agttgccagccatctgttgtttgcccctcccccgtgccttccttgaccctggaaggtgccactcccac
tgtcctttcctaataaaatgaggaaattgcatcgcattgtctgagtaggtgtcattctattctggggg
gtggggtggggcaggacagcaagggggaggattgggaagacaatagcaggcatgctggggatgcggtg
ggctctatggcttctgaggcggaaagaaccagctggggctctagggggtatccccacgcgccctgtag
cggcgcattaagcgcggcgggtgtggtggttacgcgcagcgtgaccgctacacttgccagcgccctag
cgcccgctcctttcgctttcttcccttcctttctcgccacgttcgccggctttccccgtcaagctcta
aatcgggggctccctttagggttccgatttagtgctttacggcacctcgaccccaaaaaacttgatta
gggtgatggttcacgtagtgggccatcgccctgatagacggtttttcgccctttgacgttggagtcca
cgttctttaatagtggactcttgttccaaactggaacaacactcaaccctatctcggtctattctttt
gatttataagggattttgccgatttcggcctattggttaaaaaatgagctgatttaacaaaaatttaa
cgcgaattaattctgtggaatgtgtgtcagttagggtgtggaaagtccccaggctccccagcaggcag
aagtatgcaaagcatgcatctcaattagtcagcaaccaggtgtggaaagtccccaggctccccagcag
gcagaagtatgcaaagcatgcatctcaattagtcagcaaccatagtcccgcccctaactccgcccatc
ccgcccctaactccgcccagttccgcccattctccgccccatggctgactaattttttttatttatgc
agaggccgaggccgcctctgcctctgagctattccagaagtagtgaggaggcttttttggaggcctag
gcttttgcaaaaagctcccgggagcttgtatatccattttcggatctgatcaagagacaggatgagga
tcgtttcgcatgattgaacaagatggattgcacgcaggttctccggccgcttgggtggagaggctatt
cggctatgactgggcacaacagacaatcggctgctctgatgccgccgtgttccggctgtcagcgcagg
ggcgcccggttctttttgtcaagaccgacctgtccggtgccctgaatgaactgcaggacgaggcagcg
cggctatcgtggctggccacgacgggcgttccttgcgcagctgtgctcgacgttgtcactgaagcggg
aagggactggctgctattgggcgaagtgccggggcaggatctcctgtcatctcaccttgctcctgccg
agaaagtatccatcatggctgatgcaatgcggcggctgcatacgcttgatccggctacctgcccattc
gaccaccaagcgaaacatcgcatcgagcgagcacgtactcggatggaagccggtcttgtcgatcagga
tgatctggacgaagagcatcaggggctcgcgccagccgaactgttcgccaggctcaaggcgcgcatgc
ccgacggcgaggatctcgtcgtgacccatggcgatgcctgcttgccgaatatcatggtggaaaatggc
cgcttttctggattcatcgactgtggccggctgggtgtggcggaccgctatcaggacatagcgttggc
tacccgtgatattgctgaagagcttggcggcgaatgggctgaccgcttcctcgtgctttacggtatcg
ccgctcccgattcgcagcgcatcgccttctatcgccttcttgacgagttcttctgagcgggactctgg
ggttcgaaatgaccgaccaagcgacgcccaacctgccatcacgagatttcgattccaccgccgccttc
tatgaaaggttgggcttcggaatcgttttccgggacgccggctggatgatcctccagcgcggggatct
catgctggagttcttcgcccaccccaacttgtttattgcagcttataatggttacaaataaagcaata
gcatcacaaatttcacaaataaagcatttttttcactgcattctagttgtggtttgtccaaactcatc
aatgtatcttatcatgtctgtataccgtcgacctctagctagagcttggcgtaatcatggtcatagct
gtttcctgtgtgaaattgttatccgctcacaattccacacaacatacgagccggaagcataaagtgta
aagcctggggtgcctaatgagtgagctaactcacattaattgcgttgcgctcactgcccgctttccag
tcgggaaacctgtcgtgccagctgcattaatgaatcggccaacgcgcggggagaggcggtttgcgtat
tgggcgctcttccgcttcctcgctcactgactcgctgcgctcggtcgttcggctgcggcgagcggtat
cagctcactcaaaggcggtaatacggttatccacagaatcaggggataacgcaggaaagaacatgtga
gcaaaaggccagcaaaaggccaggaaccgtaaaaaggccgcgttgctggcgtttttccataggctccg
cccccctgacgagcatcacaaaaatcgacgctcaagtcagaggtggcgaaacccgacaggactataaa
gataccaggcgtttccccctggaagctccctcgtgcgctctcctgttccgaccctgccgcttaccgga
tacctgtccgcctttctcccttcgggaagcgtggcgctttctcatagctcacgctgtaggtatctcag
ttcggtgtaggtcgttcgctccaagctgggctgtgtgcacgaaccccccgttcagcccgaccgctgcg
ccttatccggtaactatcgtcttgagtccaacccggtaagacacgacttatcgccactggcagcagcc
actggtaacaggattagcagagcgaggtatgtaggcggtgctacagagttcttgaagtggtggcctaa
ctacggctacactagaagaacagtatttggtatctgcgctctgctgaagccagttaccttcggaaaaa
gagttggtagctcttgatccggcaaacaaaccaccgctggtagcggtggtttttttgtttgcaagcag
cagattacgcgcagaaaaaaaggatctcaagaagatcctttgatcttttctacggggtctgacgctca
gtggaacgaaaactcacgttaagggattttggtcatgagattatcaaaaaggatcttcacctagatcc
ttttaaattaaaaatgaagttttaaatcaatctaaagtatatatgagtaaacttggtctgacagttac
caatgcttaatcagtgaggcacctatctcagcgatctgtctatttcgttcatccatagttgcctgact
ccccgtcgtgtagataactacgatacgggagggcttaccatctggccccagtgctgcaatgataccgc
gagacccacgctcaccggctccagatttatcagcaataaaccagccagccggaagggccgagcgcaga
agtggtcctgcaactttatccgcctccatccagtctattaattgttgccgggaagctagagtaagtag
ttcgccagttaatagtttgcgcaacgttgttgccattgctacaggcatcgtggtgtcacgctcgtcgt
ttggtatggcttcattcagctccggttcccaacgatcaaggcgagttacatgatcccccatgttgtgc
aaaaaagcggttagctccttcggtcctccgatcgttgtcagaagtaagttggccgcagtgttatcact
catggttatggcagcactgcataattctcttactgtcatgccatccgtaagatgcttttctgtgactg
gtgagtactcaaccaagtcattctgagaatagtgtatgcggcgaccgagttgctcttgcccggcgtca
atacgggataataccgcgccacatagcagaactttaaaagtgctcatcattggaaaacgttcttcggg
gcgaaaactctcaaggatcttaccgctgttgagatccagttcgatgtaacccactcgtgcacccaact
gatcttcagcatcttttactttcaccagcgtttctgggtgagcaaaaacaggaaggcaaaatgccgca
aaaaagggaataagggcgacacggaaatgttgaatactcatactcttcctttttcaatattattgaag
catttatcagggttattgtctcatgagcggatacatatttgaatgtatttagaaaaataaacaaatag
gggttccgcgcacatttccccgaaaagtgccacctgacgtc
pZV01_SARS-CoV-2_UTR-Spike_WT_HexaPro_S1_SPY_catcher003
SEQ ID NO: 83
gacggatcgggagatctcccgatcccctatggtgcactctcagtacaatctgctctgatgccgcatag
ttaagccagtatctgctccctgcttgtgtgttggaggtcgctgagtagtgcgcgagcaaaatttaagc
tacaacaaggcaaggcttgaccgacaattgcatgaagaatctgcttagggttaggcgttttgcgctgc
ttcgcgatgtacgggccagatatacgcgttgacattgattattgactagttattaatagtaatcaatt
acggggtcattagttcatagcccatatatggagttccgcgttacataacttacggtaaatggcccgcc
tggctgaccgcccaacgacccccgcccattgacgtcaataatgacgtatgttcccatagtaacgccaa
tagggactttccattgacgtcaatgggtggagtatttacggtaaactgcccacttggcagtacatcaa
gtgtatcatatgccaagtacgccccctattgacgtcaatgacggtaaatggcccgcctggcattatgc
ccagtacatgaccttatgggactttcctacttggcagtacatctacgtattagtcatcgctattacca
tggtgatgcggttttggcagtacatcaatgggcgtggatagcggtttgactcacggggatttccaagt
ctccaccccattgacgtcaatgggagtttgttttggcaccaaaatcaacgggactttccaaaatgtcg
taacaactccgccccattgacgcaaatgggcggtaggcgtgtacggtgggaggtctatataagcagag
ctctctggctaactagagaacccactgcttactggcttatcgaaattaatacgactcactatagggag
acccaagctggctagccaccgagaataaactagtattcttctggtccccacagactcagagagaaccc
gccaccatgtttgtgttcctggtgctgctgccactggtgtccagccagtgtgtgaacctgaccaccag
gacccaacttcctcctgcctacaccaactccttcaccaggggagtctactaccctgacaaggtgttca
ggtcctctgtgctgcacagcacccaggacctgttcctgccattcttcagcaatgtgacctggttccat
gccatccatgtgtctggcaccaatggcaccaagaggtttgacaaccctgtgctgccattcaatgatgg
agtctactttgccagcacagagaagagcaacatcatcaggggctggatttttggcaccaccctggaca
gcaagacccagtccctgctgattgtgaacaatgccaccaatgtggtgattaaggtgtgtgagttccag
ttctgtaatgacccattcctgggagtctactaccacaagaacaacaagtcctggatggagtctgagtt
cagggtctactcctctgccaacaactgtacctttgaatatgtgagccaaccattcctgatggacttgg
agggcaagcagggcaacttcaagaacctgagggagtttgtgttcaagaacattgatggctacttcaag
atttacagcaaacacacaccaatcaacctggtgagggacctgccacagggcttctctgccttggaacc
actggtggacctgccaattggcatcaacatcaccaggttccagaccctgctggctctgcacaggtcct
acctgacacctggagactcctcctctggctggacagcaggagcagcagcctactatgtgggctacctc
caaccaaggaccttcctgctgaaatacaatgagaatggcaccatcacagatgctgtggactgtgccct
ggacccactgtctgagaccaagtgtaccctgaaatccttcacagtggagaagggcatctaccagacca
gcaacttcagggtccaaccaacagagagcattgtgaggtttccaaacatcaccaacctgtgtccattt
ggagaggtgttcaatgccaccaggtttgcctctgtctatgcctggaacaggaagaggattagcaactg
tgtggctgactactctgtgctctacaactctgcctccttcagcaccttcaagtgttatggagtgagcc
caaccaaactgaatgacctgtgtttcaccaatgtctatgctgactcctttgtgattaggggagatgag
gtgagacagattgcccctggacaaacaggcaagattgctgactacaactacaaactgcctgatgactt
cacaggctgtgtgattgcctggaacagcaacaacctggacagcaaggtgggaggcaactacaactacc
tctacagactgttcaggaagagcaacctgaaaccatttgagagggacatcagcacagagatttaccag
gctggcagcacaccatgtaatggagtggagggcttcaactgttactttccactccaatcctatggctt
ccaaccaaccaatggagtgggctaccaaccatacagggtggtggtgctgtcctttgaactgctccatg
cccctgccacagtgtgtggaccaaagaagagcaccaacctggtgaagaacaagtgtgtgaacttcaac
ttcaatggactgacaggcacaggagtgctgacagagagcaacaagaagttcctgccattccaacagtt
tggcagggacattgctgacaccacagatgctgtgagggacccacagaccttggagattctggacatca
caccatgttcctttggaggagtgtctgtgattacacctggcaccaacaccagcaaccaggtggctgtg
ctctaccaggatgtgaactgtggcgcgatggtgaccacactgtccggactgtctggagagcagggacc
atccggcgacatgaccacagaggaggattctgccacacacatcaagttcagcaagagggacgaggacg
gaagagagctggcaggagcaaccatggagctgagggatagctccggcaagaccatcagcacatggatc
tccgacggccacgtgaaggatttctacctgtatcccggcaagtacacctttgtggagacagcagcacc
agacggatatgaggtggcaacccctatcgagtttacagtgaacgaggacggacaggtgaccgtggatg
gagaggcaacagagggcgatgcacacacctgactcgagctggtactgcatgcacgcaatgctagctgc
ccctttcccgtcctgggtaccccgagtctcccccgacctcgggtcccaggtatgctcccacctccacc
tgccccactcaccacctctgctagttccagacacctcccaagcacgcagcaatgcagctcaaaacgct
tagcctagccacacccccacgggaaacagcagtgattaacctttagcaataaacgaaagtttaactaa
gctatactaaccccagggttggtcaatttcgtgccagccacaccctggagctagcaaaccgctgatca
gcctcgactgtgccttctagttgccagccatctgttgtttgcccctcccccgtgccttccttgaccct
ggaaggtgccactcccactgtcctttcctaataaaatgaggaaattgcatcgcattgtctgagtaggt
gtcattctattctggggggtggggtggggcaggacagcaagggggaggattgggaagacaatagcagg
catgctggggatgcggtgggctctatggcttctgaggcggaaagaaccagctggggctctagggggta
tccccacgcgccctgtagcggcgcattaagcgcggcgggtgtggtggttacgcgcagcgtgaccgcta
cacttgccagcgccctagcgcccgctcctttcgctttcttcccttcctttctcgccacgttcgccggc
tttccccgtcaagctctaaatcgggggctccctttagggttccgatttagtgctttacggcacctcga
ccccaaaaaacttgattagggtgatggttcacgtagtgggccatcgccctgatagacggtttttcgcc
ctttgacgttggagtccacgttctttaatagtggactcttgttccaaactggaacaacactcaaccct
atctcggtctattcttttgatttataagggattttgccgatttcggcctattggttaaaaaatgagct
gatttaacaaaaatttaacgcgaattaattctgtggaatgtgtgtcagttagggtgtggaaagtcccc
aggctccccagcaggcagaagtatgcaaagcatgcatctcaattagtcagcaaccaggtgtggaaagt
ccccaggctccccagcaggcagaagtatgcaaagcatgcatctcaattagtcagcaaccatagtcccg
cccctaactccgcccatcccgcccctaactccgcccagttccgcccattctccgccccatggctgact
aattttttttatttatgcagaggccgaggccgcctctgcctctgagctattccagaagtagtgaggag
gcttttttggaggcctaggcttttgcaaaaagctcccgggagcttgtatatccattttcggatctgat
caagagacaggatgaggatcgtttcgcatgattgaacaagatggattgcacgcaggttctccggccgc
ttgggtggagaggctattcggctatgactgggcacaacagacaatcggctgctctgatgccgccgtgt
tccggctgtcagcgcaggggcgcccggttctttttgtcaagaccgacctgtccggtgccctgaatgaa
ctgcaggacgaggcagcgcggctatcgtggctggccacgacgggcgttccttgcgcagctgtgctcga
cgttgtcactgaagcgggaagggactggctgctattgggcgaagtgccggggcaggatctcctgtcat
ctcaccttgctcctgccgagaaagtatccatcatggctgatgcaatgcggcggctgcatacgcttgat
ccggctacctgcccattcgaccaccaagcgaaacatcgcatcgagcgagcacgtactcggatggaagc
cggtcttgtcgatcaggatgatctggacgaagagcatcaggggctcgcgccagccgaactgttcgcca
ggctcaaggcgcgcatgcccgacggcgaggatctcgtcgtgacccatggcgatgcctgcttgccgaat
atcatggtggaaaatggccgcttttctggattcatcgactgtggccggctgggtgtggcggaccgcta
tcaggacatagcgttggctacccgtgatattgctgaagagcttggcggcgaatgggctgaccgcttcc
tcgtgctttacggtatcgccgctcccgattcgcagcgcatcgccttctatcgccttcttgacgagttc
ttctgagcgggactctggggttcgaaatgaccgaccaagcgacgcccaacctgccatcacgagatttc
gattccaccgccgccttctatgaaaggttgggcttcggaatcgttttccgggacgccggctggatgat
cctccagcgcggggatctcatgctggagttcttcgcccaccccaacttgtttattgcagcttataatg
gttacaaataaagcaatagcatcacaaatttcacaaataaagcatttttttcactgcattctagttgt
ggtttgtccaaactcatcaatgtatcttatcatgtctgtataccgtcgacctctagctagagcttggc
gtaatcatggtcatagctgtttcctgtgtgaaattgttatccgctcacaattccacacaacatacgag
ccggaagcataaagtgtaaagcctggggtgcctaatgagtgagctaactcacattaattgcgttgcgc
tcactgcccgctttccagtcgggaaacctgtcgtgccagctgcattaatgaatcggccaacgcgcggg
gagaggcggtttgcgtattgggcgctcttccgcttcctcgctcactgactcgctgcgctcggtcgttc
ggctgcggcgagcggtatcagctcactcaaaggcggtaatacggttatccacagaatcaggggataac
gcaggaaagaacatgtgagcaaaaggccagcaaaaggccaggaaccgtaaaaaggccgcgttgctggc
gtttttccataggctccgcccccctgacgagcatcacaaaaatcgacgctcaagtcagaggtggcgaa
acccgacaggactataaagataccaggcgtttccccctggaagctccctcgtgcgctctcctgttccg
accctgccgcttaccggatacctgtccgcctttctcccttcgggaagcgtggcgctttctcatagctc
acgctgtaggtatctcagttcggtgtaggtcgttcgctccaagctgggctgtgtgcacgaaccccccg
ttcagcccgaccgctgcgccttatccggtaactatcgtcttgagtccaacccggtaagacacgactta
tcgccactggcagcagccactggtaacaggattagcagagcgaggtatgtaggcggtgctacagagtt
cttgaagtggtggcctaactacggctacactagaagaacagtatttggtatctgcgctctgctgaagc
cagttaccttcggaaaaagagttggtagctcttgatccggcaaacaaaccaccgctggtagcggtggt
ttttttgtttgcaagcagcagattacgcgcagaaaaaaaggatctcaagaagatcctttgatcttttc
tacggggtctgacgctcagtggaacgaaaactcacgttaagggattttggtcatgagattatcaaaaa
ggatcttcacctagatccttttaaattaaaaatgaagttttaaatcaatctaaagtatatatgagtaa
acttggtctgacagttaccaatgcttaatcagtgaggcacctatctcagcgatctgtctatttcgttc
atccatagttgcctgactccccgtcgtgtagataactacgatacgggagggcttaccatctggcccca
gtgctgcaatgataccgcgagacccacgctcaccggctccagatttatcagcaataaaccagccagcc
ggaagggccgagcgcagaagtggtcctgcaactttatccgcctccatccagtctattaattgttgccg
ggaagctagagtaagtagttcgccagttaatagtttgcgcaacgttgttgccattgctacaggcatcg
tggtgtcacgctcgtcgtttggtatggcttcattcagctccggttcccaacgatcaaggcgagttaca
tgatcccccatgttgtgcaaaaaagcggttagctccttcggtcctccgatcgttgtcagaagtaagtt
ggccgcagtgttatcactcatggttatggcagcactgcataattctcttactgtcatgccatccgtaa
gatgcttttctgtgactggtgagtactcaaccaagtcattctgagaatagtgtatgcggcgaccgagt
tgctcttgcccggcgtcaatacgggataataccgcgccacatagcagaactttaaaagtgctcatcat
tggaaaacgttcttcggggcgaaaactctcaaggatcttaccgctgttgagatccagttcgatgtaac
ccactcgtgcacccaactgatcttcagcatcttttactttcaccagcgtttctgggtgagcaaaaaca
ggaaggcaaaatgccgcaaaaaagggaataagggcgacacggaaatgttgaatactcatactcttcct
ttttcaatattattgaagcatttatcagggttattgtctcatgagcggatacatatttgaatgtattt
agaaaaataaacaaataggggttccgcgcacatttccccgaaaagtgccacctgacgtc
pZV02_SARS-CoV-2_UTR-Spike_WT_hexapro_SPY_tag003_S2
SEQ ID NO: 84
gacggatcgggagatctcccgatcccctatggtgcactctcagtacaatctgctctgatgccgcatag
ttaagccagtatctgctccctgcttgtgtgttggaggtcgctgagtagtgcgcgagcaaaatttaagc
tacaacaaggcaaggcttgaccgacaattgcatgaagaatctgcttagggttaggcgttttgcgctgc
ttcgcgatgtacgggccagatatacgcgttgacattgattattgactagttattaatagtaatcaatt
acggggtcattagttcatagcccatatatggagttccgcgttacataacttacggtaaatggcccgcc
tggctgaccgcccaacgacccccgcccattgacgtcaataatgacgtatgttcccatagtaacgccaa
tagggactttccattgacgtcaatgggtggagtatttacggtaaactgcccacttggcagtacatcaa
gtgtatcatatgccaagtacgccccctattgacgtcaatgacggtaaatggcccgcctggcattatgc
ccagtacatgaccttatgggactttcctacttggcagtacatctacgtattagtcatcgctattacca
tggtgatgcggttttggcagtacatcaatgggcgtggatagcggtttgactcacggggatttccaagt
ctccaccccattgacgtcaatgggagtttgttttggcaccaaaatcaacgggactttccaaaatgtcg
taacaactccgccccattgacgcaaatgggcggtaggcgtgtacggtgggaggtctatataagcagag
ctctctggctaactagagaacccactgcttactggcttatcgaaattaatacgactcactatagggag
acccaagctggctagccaccgagaataaactagtattcttctggtccccacagactcagagagaaccc
gccaccatgggccgtggcgtgcctcatatcgtgatggtggacgcctacaagcgttacaagactgaggt
gcctgtggctatccatgctgaccaacttacaccaacctggagggtctacagcacaggcagcaatgtgt
tccagaccagggctggctgtctgattggagcagagcatgtgaacaactcctatgagtgtgacatccca
attggagcaggcatctgtgcctcctaccagacccagaccaacagcccaggctctgcatcttctgtggc
aagccagagcatcattgcctacacaatgagtctgggagcagagaactctgtggcttacagcaacaaca
gcattgccatcccaaccaacttcaccatctctgtgaccacagagattctgcctgtgagtatgaccaag
acctctgtggactgtacaatgtatatctgtggagacagcacagagtgtagcaacctgctgctccaata
tggctccttctgtacccaacttaacagggctctgacaggcattgctgtggaacaggacaagaacaccc
aggaggtgtttgcccaggtgaagcagatttacaagacacctccaatcaaggactttggaggcttcaac
ttcagccagattctgcctgacccaagcaagccaagcaagaggtcccctattgaggacctgctgttcaa
caaggtgaccctggctgatgctggcttcatcaagcaatatggagactgtctgggagacattgctgcca
gggacctgatttgtgcccagaagttcaatggactgacagtgctgcctccactgctgacagatgagatg
attgcccaatacacctctgccctgctggctggcaccatcacctctggctggacctttggagcaggacc
agccctccaaatcccatttccaatgcagatggcttacaggttcaatggcattggagtgacccagaatg
tgctctatgagaaccagaaactgattgccaaccagttcaactctgccattggcaagattcaggactcc
ctgtccagcacaccatctgccctgggcaaactccaagatgtggtgaaccagaatgcccaggctctgaa
caccctggtgaagcaactttccagcaactttggagccatctcctctgtgctgaatgacatcctgagca
gactggacccaccagaggctgaggtccagattgacagactgattacaggcagactccaatccctccaa
acctatgtgacccaacaacttatcagggctgctgagattagggcatctgccaacctggctgccaccaa
gatgagtgagtgtgtgctgggacaaagcaagagggtggacttctgtggcaagggctaccacctgatga
gttttccacagtctgcccctcatggagtggtgttcctgcatgtgacctatgtgcctgcccaggagaag
aacttcaccacagcccctgccatctgccatgatggcaaggctcactttccaagggagggagtgtttgt
gagcaatggcacccactggtttgtgacccagaggaacttctatgaaccacagattatcaccacagaca
acacctttgtgtctggcaactgtgatgtggtgattggcattgtgaacaacacagtctatgacccactc
caacctgaactggactccttcaaggaggaactggacaaatacttcaagaaccacaccagccctgatgt
ggacctgggagacatctctggcatcaatgcctctgtggtgaacatccagaaggagattgacagactga
atgaggtggctaagaacctgaatgagtccctgattgacctccaagaactgggcaaatatgaacaatac
atcaagtggccatggtacatctggctgggcttcattgctggactgattgccattgtgatggtgaccat
aatgctgtgttgtatgacctcctgttgttcctgtctgaaaggctgttgttcctgtggctcctgttgta
agtttgatgaggatgactctgaacctgtgctgaaaggagtgaaactgcactacacctgactcgagctg
gtactgcatgcacgcaatgctagctgcccctttcccgtcctgggtaccccgagtctcccccgacctcg
ggtcccaggtatgctcccacctccacctgccccactcaccacctctgctagttccagacacctcccaa
gcacgcagcaatgcagctcaaaacgcttagcctagccacacccccacgggaaacagcagtgattaacc
tttagcaataaacgaaagtttaactaagctatactaaccccagggttggtcaatttcgtgccagccac
accctggagctagcaaaccgctgatcagcctcgactgtgccttctagttgccagccatctgttgtttg
cccctcccccgtgccttccttgaccctggaaggtgccactcccactgtcctttcctaataaaatgagg
aaattgcatcgcattgtctgagtaggtgtcattctattctggggggtggggtggggcaggacagcaag
ggggaggattgggaagacaatagcaggcatgctggggatgcggtgggctctatggcttctgaggcgga
aagaaccagctggggctctagggggtatccccacgcgccctgtagcggcgcattaagcgcggcgggtg
tggtggttacgcgcagcgtgaccgctacacttgccagcgccctagcgcccgctcctttcgctttcttc
ccttcctttctcgccacgttcgccggctttccccgtcaagctctaaatcgggggctccctttagggtt
ccgatttagtgctttacggcacctcgaccccaaaaaacttgattagggtgatggttcacgtagtgggc
catcgccctgatagacggtttttcgccctttgacgttggagtccacgttctttaatagtggactcttg
ttccaaactggaacaacactcaaccctatctcggtctattcttttgatttataagggattttgccgat
ttcggcctattggttaaaaaatgagctgatttaacaaaaatttaacgcgaattaattctgtggaatgt
gtgtcagttagggtgtggaaagtccccaggctccccagcaggcagaagtatgcaaagcatgcatctca
attagtcagcaaccaggtgtggaaagtccccaggctccccagcaggcagaagtatgcaaagcatgcat
ctcaattagtcagcaaccatagtcccgcccctaactccgcccatcccgcccctaactccgcccagttc
cgcccattctccgccccatggctgactaattttttttatttatgcagaggccgaggccgcctctgcct
ctgagctattccagaagtagtgaggaggcttttttggaggcctaggcttttgcaaaaagctcccggga
gcttgtatatccattttcggatctgatcaagagacaggatgaggatcgtttcgcatgattgaacaaga
tggattgcacgcaggttctccggccgcttgggtggagaggctattcggctatgactgggcacaacaga
caatcggctgctctgatgccgccgtgttccggctgtcagcgcaggggcgcccggttctttttgtcaag
accgacctgtccggtgccctgaatgaactgcaggacgaggcagcgcggctatcgtggctggccacgac
gggcgttccttgcgcagctgtgctcgacgttgtcactgaagcgggaagggactggctgctattgggcg
aagtgccggggcaggatctcctgtcatctcaccttgctcctgccgagaaagtatccatcatggctgat
gcaatgcggcggctgcatacgcttgatccggctacctgcccattcgaccaccaagcgaaacatcgcat
cgagcgagcacgtactcggatggaagccggtcttgtcgatcaggatgatctggacgaagagcatcagg
ggctcgcgccagccgaactgttcgccaggctcaaggcgcgcatgcccgacggcgaggatctcgtcgtg
acccatggcgatgcctgcttgccgaatatcatggtggaaaatggccgcttttctggattcatcgactg
tggccggctgggtgtggcggaccgctatcaggacatagcgttggctacccgtgatattgctgaagagc
ttggcggcgaatgggctgaccgcttcctcgtgctttacggtatcgccgctcccgattcgcagcgcatc
gccttctatcgccttcttgacgagttcttctgagcgggactctggggttcgaaatgaccgaccaagcg
acgcccaacctgccatcacgagatttcgattccaccgccgccttctatgaaaggttgggcttcggaat
cgttttccgggacgccggctggatgatcctccagcgcggggatctcatgctggagttcttcgcccacc
ccaacttgtttattgcagcttataatggttacaaataaagcaatagcatcacaaatttcacaaataaa
gcatttttttcactgcattctagttgtggtttgtccaaactcatcaatgtatcttatcatgtctgtat
accgtcgacctctagctagagcttggcgtaatcatggtcatagctgtttcctgtgtgaaattgttatc
cgctcacaattccacacaacatacgagccggaagcataaagtgtaaagcctggggtgcctaatgagtg
agctaactcacattaattgcgttgcgctcactgcccgctttccagtcgggaaacctgtcgtgccagct
gcattaatgaatcggccaacgcgcggggagaggcggtttgcgtattgggcgctcttccgcttcctcgc
tcactgactcgctgcgctcggtcgttcggctgcggcgagcggtatcagctcactcaaaggcggtaata
cggttatccacagaatcaggggataacgcaggaaagaacatgtgagcaaaaggccagcaaaaggccag
gaaccgtaaaaaggccgcgttgctggcgtttttccataggctccgcccccctgacgagcatcacaaaa
atcgacgctcaagtcagaggtggcgaaacccgacaggactataaagataccaggcgtttccccctgga
agctccctcgtgcgctctcctgttccgaccctgccgcttaccggatacctgtccgcctttctcccttc
gggaagcgtggcgctttctcatagctcacgctgtaggtatctcagttcggtgtaggtcgttcgctcca
agctgggctgtgtgcacgaaccccccgttcagcccgaccgctgcgccttatccggtaactatcgtctt
gagtccaacccggtaagacacgacttatcgccactggcagcagccactggtaacaggattagcagagc
gaggtatgtaggcggtgctacagagttcttgaagtggtggcctaactacggctacactagaagaacag
tatttggtatctgcgctctgctgaagccagttaccttcggaaaaagagttggtagctcttgatccggc
aaacaaaccaccgctggtagcggtggtttttttgtttgcaagcagcagattacgcgcagaaaaaaagg
atctcaagaagatcctttgatcttttctacggggtctgacgctcagtggaacgaaaactcacgttaag
ggattttggtcatgagattatcaaaaaggatcttcacctagatccttttaaattaaaaatgaagtttt
aaatcaatctaaagtatatatgagtaaacttggtctgacagttaccaatgcttaatcagtgaggcacc
tatctcagcgatctgtctatttcgttcatccatagttgcctgactccccgtcgtgtagataactacga
tacgggagggcttaccatctggccccagtgctgcaatgataccgcgagacccacgctcaccggctcca
gatttatcagcaataaaccagccagccggaagggccgagcgcagaagtggtcctgcaactttatccgc
ctccatccagtctattaattgttgccgggaagctagagtaagtagttcgccagttaatagtttgcgca
acgttgttgccattgctacaggcatcgtggtgtcacgctcgtcgtttggtatggcttcattcagctcc
ggttcccaacgatcaaggcgagttacatgatcccccatgttgtgcaaaaaagcggttagctccttcgg
tcctccgatcgttgtcagaagtaagttggccgcagtgttatcactcatggttatggcagcactgcata
attctcttactgtcatgccatccgtaagatgcttttctgtgactggtgagtactcaaccaagtcattc
tgagaatagtgtatgcggcgaccgagttgctcttgcccggcgtcaatacgggataataccgcgccaca
tagcagaactttaaaagtgctcatcattggaaaacgttcttcggggcgaaaactctcaaggatcttac
cgctgttgagatccagttcgatgtaacccactcgtgcacccaactgatcttcagcatcttttactttc
accagcgtttctgggtgagcaaaaacaggaaggcaaaatgccgcaaaaaagggaataagggcgacacg
gaaatgttgaatactcatactcttcctttttcaatattattgaagcatttatcagggttattgtctca
tgagcggatacatatttgaatgtatttagaaaaataaacaaataggggttccgcgcacatttccccga
aaagtgccacctgacgtc
pZV03_SARS-CoV-2-UTR-spike_delta_HexaPro_S1_S683_furin_SPY_tag
SEQ ID NO: 85
gacggatcgggagatctcccgatcccctatggtgcactctcagtacaatctgctctgatgccgcatag
ttaagccagtatctgctccctgcttgtgtgttggaggtcgctgagtagtgcgcgagcaaaatttaagc
tacaacaaggcaaggcttgaccgacaattgcatgaagaatctgcttagggttaggcgttttgcgctgc
ttcgcgatgtacgggccagatatacgcgttgacattgattattgactagttattaatagtaatcaatt
acggggtcattagttcatagcccatatatggagttccgcgttacataacttacggtaaatggcccgcc
tggctgaccgcccaacgacccccgcccattgacgtcaataatgacgtatgttcccatagtaacgccaa
tagggactttccattgacgtcaatgggtggagtatttacggtaaactgcccacttggcagtacatcaa
gtgtatcatatgccaagtacgccccctattgacgtcaatgacggtaaatggcccgcctggcattatgc
ccagtacatgaccttatgggactttcctacttggcagtacatctacgtattagtcatcgctattacca
tggtgatgcggttttggcagtacatcaatgggcgtggatagcggtttgactcacggggatttccaagt
ctccaccccattgacgtcaatgggagtttgttttggcaccaaaatcaacgggactttccaaaatgtcg
taacaactccgccccattgacgcaaatgggcggtaggcgtgtacggtgggaggtctatataagcagag
ctctctggctaactagagaacccactgcttactggcttatcgaaattaatacgactcactatagggag
acccaagctggctagccaccgagaataaactagtattcttctggtccccacagactcagagagaaccc
gccaccatgtttgtgttcctggtgctgctgccactggtgtccagccagtgtgtgaacctgaggaccag
gacccaacttcctcctgcctacaccaactccttcaccaggggagtctactaccctgacaaggtgttca
ggtcctctgtgctgcacagcacccaggacctgttcctgccattcttcagcaatgtgacctggttccat
gccatccatgtgtctggcaccaatggcaccaagaggtttgacaaccctgtgctgccattcaatgatgg
agtctactttgccagcacagagaagagcaacatcatcaggggctggatttttggcaccaccctggaca
gcaagacccagtccctgctgattgtgaacaatgccaccaatgtggtgattaaggtgtgtgagttccag
ttctgtaatgacccattcctggacgtctactaccacaagaacaacaagtcctggatggagtctggcgt
ctactcctctgccaacaactgtacctttgaatatgtgagccaaccattcctgatggacttggagggca
agcagggcaacttcaagaacctgagggagtttgtgttcaagaacattgatggctacttcaagatttac
agcaaacacacaccaatcaacctggtgagggacctgccacagggcttctctgccttggaaccactggt
ggacctgccaattggcatcaacatcaccaggttccagaccctgctggctctgcacaggtcctacctga
cacctggagactcctcctctggctggacagcaggagcagcagcctactatgtgggctacctccaacca
aggaccttcctgctgaaatacaatgagaatggcaccatcacagatgctgtggactgtgccctggaccc
actgtctgagaccaagtgtaccctgaaatccttcacagtggagaagggcatctaccagaccagcaact
tcagggtccaaccaacagagagcattgtgaggtttccaaacatcaccaacctgtgtccatttggagag
gtgttcaatgccaccaggtttgcctctgtctatgcctggaacaggaagaggattagcaactgtgtggc
tgactactctgtgctctacaactctgcctccttcagcaccttcaagtgttatggagtgagcccaacca
aactgaatgacctgtgtttcaccaatgtctatgctgactcctttgtgattaggggagatgaggtgaga
cagattgcccctggacaaacaggcaagattgctgactacaactacaaactgcctgatgacttcacagg
ctgtgtgattgcctggaacagcaacaacctggacagcaaggtgggaggcaactacaactacaggtaca
gactgttcaggaagagcaacctgaaaccatttgagagggacatcagcacagagatttaccaggctggc
agcaagccatgtaatggagtggagggcttcaactgttactttccactccaatcctatggcttccaacc
aaccaatggagtgggctaccaaccatacagggtggtggtgctgtcctttgaactgctccatgcccctg
ccacagtgtgtggaccaaagaagagcaccaacctggtgaagaacaagtgtgtgaacttcaacttcaat
ggactgacaggcacaggagtgctgacagagagcaacaagaagttcctgccattccaacagtttggcag
ggacattgctgacaccacagatgctgtgagggacccacagaccttggagattctggacatcacaccat
gttcctttggaggagtgtctgtgattacacctggcaccaacaccagcaaccaggtggctgtgctctac
cagggcgtgaactgtactgaggtgcctgtggctatccatgctgaccaacttacaccaacctggagggt
ctacagcacaggaagcaacgtgttccagaccagggctggctgtctgattggagcagagcatgtgaaca
actcctatgagtgtgacatcccaattggagcaggcatctgtgcctcctaccagacccagaccaacagc
aggggctctgcatctcgtggcgtgcctcatatcgtgatggtggacgcctacaagcgttacaagtgact
cgagctggtactgcatgcacgcaatgctagctgcccctttcccgtcctgggtaccccgagtctccccc
gacctcgggtcccaggtatgctcccacctccacctgccccactcaccacctctgctagttccagacac
ctcccaagcacgcagcaatgcagctcaaaacgcttagcctagccacacccccacgggaaacagcagtg
attaacctttagcaataaacgaaagtttaactaagctatactaaccccagggttggtcaatttcgtgc
cagccacaccctggagctagcaaaccgctgatcagcctcgactgtgccttctagttgccagccatctg
ttgtttgcccctcccccgtgccttccttgaccctggaaggtgccactcccactgtcctttcctaataa
aatgaggaaattgcatcgcattgtctgagtaggtgtcattctattctggggggtggggtggggcagga
cagcaagggggaggattgggaagacaatagcaggcatgctggggatgcggtgggctctatggcttctg
aggcggaaagaaccagctggggctctagggggtatccccacgcgccctgtagcggcgcattaagcgcg
gcgggtgtggtggttacgcgcagcgtgaccgctacacttgccagcgccctagcgcccgctcctttcgc
tttcttcccttcctttctcgccacgttcgccggctttccccgtcaagctctaaatcgggggctccctt
tagggttccgatttagtgctttacggcacctcgaccccaaaaaacttgattagggtgatggttcacgt
agtgggccatcgccctgatagacggtttttcgccctttgacgttggagtccacgttctttaatagtgg
actcttgttccaaactggaacaacactcaaccctatctcggtctattcttttgatttataagggattt
tgccgatttcggcctattggttaaaaaatgagctgatttaacaaaaatttaacgcgaattaattctgt
ggaatgtgtgtcagttagggtgtggaaagtccccaggctccccagcaggcagaagtatgcaaagcatg
catctcaattagtcagcaaccaggtgtggaaagtccccaggctccccagcaggcagaagtatgcaaag
catgcatctcaattagtcagcaaccatagtcccgcccctaactccgcccatcccgcccctaactccgc
ccagttccgcccattctccgccccatggctgactaattttttttatttatgcagaggccgaggccgcc
tctgcctctgagctattccagaagtagtgaggaggcttttttggaggcctaggcttttgcaaaaagct
cccgggagcttgtatatccattttcggatctgatcaagagacaggatgaggatcgtttcgcatgattg
aacaagatggattgcacgcaggttctccggccgcttgggtggagaggctattcggctatgactgggca
caacagacaatcggctgctctgatgccgccgtgttccggctgtcagcgcaggggcgcccggttctttt
tgtcaagaccgacctgtccggtgccctgaatgaactgcaggacgaggcagcgcggctatcgtggctgg
ccacgacgggcgttccttgcgcagctgtgctcgacgttgtcactgaagcgggaagggactggctgcta
ttgggcgaagtgccggggcaggatctcctgtcatctcaccttgctcctgccgagaaagtatccatcat
ggctgatgcaatgcggcggctgcatacgcttgatccggctacctgcccattcgaccaccaagcgaaac
atcgcatcgagcgagcacgtactcggatggaagccggtcttgtcgatcaggatgatctggacgaagag
catcaggggctcgcgccagccgaactgttcgccaggctcaaggcgcgcatgcccgacggcgaggatct
cgtcgtgacccatggcgatgcctgcttgccgaatatcatggtggaaaatggccgcttttctggattca
tcgactgtggccggctgggtgtggcggaccgctatcaggacatagcgttggctacccgtgatattgct
gaagagcttggcggcgaatgggctgaccgcttcctcgtgctttacggtatcgccgctcccgattcgca
gcgcatcgccttctatcgccttcttgacgagttcttctgagcgggactctggggttcgaaatgaccga
ccaagcgacgcccaacctgccatcacgagatttcgattccaccgccgccttctatgaaaggttgggct
tcggaatcgttttccgggacgccggctggatgatcctccagcgcggggatctcatgctggagttcttc
gcccaccccaacttgtttattgcagcttataatggttacaaataaagcaatagcatcacaaatttcac
aaataaagcatttttttcactgcattctagttgtggtttgtccaaactcatcaatgtatcttatcatg
tctgtataccgtcgacctctagctagagcttggcgtaatcatggtcatagctgtttcctgtgtgaaat
tgttatccgctcacaattccacacaacatacgagccggaagcataaagtgtaaagcctggggtgccta
atgagtgagctaactcacattaattgcgttgcgctcactgcccgctttccagtcgggaaacctgtcgt
gccagctgcattaatgaatcggccaacgcgcggggagaggcggtttgcgtattgggcgctcttccgct
tcctcgctcactgactcgctgcgctcggtcgttcggctgcggcgagcggtatcagctcactcaaaggc
ggtaatacggttatccacagaatcaggggataacgcaggaaagaacatgtgagcaaaaggccagcaaa
aggccaggaaccgtaaaaaggccgcgttgctggcgtttttccataggctccgcccccctgacgagcat
cacaaaaatcgacgctcaagtcagaggtggcgaaacccgacaggactataaagataccaggcgtttcc
ccctggaagctccctcgtgcgctctcctgttccgaccctgccgcttaccggatacctgtccgcctttc
tcccttcgggaagcgtggcgctttctcatagctcacgctgtaggtatctcagttcggtgtaggtcgtt
cgctccaagctgggctgtgtgcacgaaccccccgttcagcccgaccgctgcgccttatccggtaacta
tcgtcttgagtccaacccggtaagacacgacttatcgccactggcagcagccactggtaacaggatta
gcagagcgaggtatgtaggcggtgctacagagttcttgaagtggtggcctaactacggctacactaga
agaacagtatttggtatctgcgctctgctgaagccagttaccttcggaaaaagagttggtagctcttg
atccggcaaacaaaccaccgctggtagcggtggtttttttgtttgcaagcagcagattacgcgcagaa
aaaaaggatctcaagaagatcctttgatcttttctacggggtctgacgctcagtggaacgaaaactca
cgttaagggattttggtcatgagattatcaaaaaggatcttcacctagatccttttaaattaaaaatg
aagttttaaatcaatctaaagtatatatgagtaaacttggtctgacagttaccaatgcttaatcagtg
aggcacctatctcagcgatctgtctatttcgttcatccatagttgcctgactccccgtcgtgtagata
actacgatacgggagggcttaccatctggccccagtgctgcaatgataccgcgagacccacgctcacc
ggctccagatttatcagcaataaaccagccagccggaagggccgagcgcagaagtggtcctgcaactt
tatccgcctccatccagtctattaattgttgccgggaagctagagtaagtagttcgccagttaatagt
ttgcgcaacgttgttgccattgctacaggcatcgtggtgtcacgctcgtcgtttggtatggcttcatt
cagctccggttcccaacgatcaaggcgagttacatgatcccccatgttgtgcaaaaaagcggttagct
ccttcggtcctccgatcgttgtcagaagtaagttggccgcagtgttatcactcatggttatggcagca
ctgcataattctcttactgtcatgccatccgtaagatgcttttctgtgactggtgagtactcaaccaa
gtcattctgagaatagtgtatgcggcgaccgagttgctcttgcccggcgtcaatacgggataataccg
cgccacatagcagaactttaaaagtgctcatcattggaaaacgttcttcggggcgaaaactctcaagg
atcttaccgctgttgagatccagttcgatgtaacccactcgtgcacccaactgatcttcagcatcttt
tactttcaccagcgtttctgggtgagcaaaaacaggaaggcaaaatgccgcaaaaaagggaataaggg
cgacacggaaatgttgaatactcatactcttcctttttcaatattattgaagcatttatcagggttat
tgtctcatgagcggatacatatttgaatgtatttagaaaaataaacaaataggggttccgcgcacatt
tccccgaaaagtgccacctgacgtc
pZV04_SARS-CoV-2-UTR-spike_delta_HexaPro_SPY_catcher_S684_S2
SEQ ID NO: 86
gacggatcgggagatctcccgatcccctatggtgcactctcagtacaatctgctctgatgccgcatag
ttaagccagtatctgctccctgcttgtgtgttggaggtcgctgagtagtgcgcgagcaaaatttaagc
tacaacaaggcaaggcttgaccgacaattgcatgaagaatctgcttagggttaggcgttttgcgctgc
ttcgcgatgtacgggccagatatacgcgttgacattgattattgactagttattaatagtaatcaatt
acggggtcattagttcatagcccatatatggagttccgcgttacataacttacggtaaatggcccgcc
tggctgaccgcccaacgacccccgcccattgacgtcaataatgacgtatgttcccatagtaacgccaa
tagggactttccattgacgtcaatgggtggagtatttacggtaaactgcccacttggcagtacatcaa
gtgtatcatatgccaagtacgccccctattgacgtcaatgacggtaaatggcccgcctggcattatgc
ccagtacatgaccttatgggactttcctacttggcagtacatctacgtattagtcatcgctattacca
tggtgatgcggttttggcagtacatcaatgggcgtggatagcggtttgactcacggggatttccaagt
ctccaccccattgacgtcaatgggagtttgttttggcaccaaaatcaacgggactttccaaaatgtcg
taacaactccgccccattgacgcaaatgggcggtaggcgtgtacggtgggaggtctatataagcagag
ctctctggctaactagagaacccactgcttactggcttatcgaaattaatacgactcactatagggag
acccaagctggctagccaccgagaataaactagtattcttctggtccccacagactcagagagaaccc
gccaccatgtttgtgttcctggtgctgctgccactggtgtccagcgtgaccacactgtccggactgtc
tggagagcagggaccatccggcgacatgaccacagaggaggattctgccacacacatcaagttcagca
agagggacgaggacggaagagagctggcaggagcaaccatggagctgagggatagctccggcaagacc
atcagcacatggatctccgacggccacgtgaaggatttctacctgtatcccggcaagtacacctttgt
ggagacagcagcaccagacggatatgaggtggcaacccctatcgagtttacagtgaacgaggacggac
aggtgaccgtggatggagaggcaacagagggcgatgcacacaccggcagcagctctgtggcaagccag
agcatcattgcctacacaatgagtctgggagcagagaactctgtggcttacagcaacaacagcattgc
catcccaaccaacttcaccatctctgtgaccacagagattctgcctgtgagtatgaccaagacctctg
tggactgtacaatgtatatctgtggagacagcacagagtgtagcaacctgctgctccaatatggctcc
ttctgtacccaacttaacagggctctgacaggcattgctgtggaacaggacaagaacacccaggaggt
gtttgcccaggtgaagcagatttacaagacacctccaatcaaggactttggaggcttcaacttcagcc
agattctgcctgacccaagcaagccaagcaagaggtcccctattgaggacctgctgttcaacaaggtg
accctggctgatgctggcttcatcaagcaatatggagactgtctgggagacattgccgccagggacct
gatttgtgcccagaagttcaatggactgacagtgctgcctccactgctgacagatgagatgattgccc
aatacacctctgccctgctggctggcaccatcacctctggctggacctttggagcaggaccagccctc
caaatcccatttccaatgcagatggcttacaggttcaatggcattggagtgacccagaatgtgctcta
tgagaaccagaaactgattgccaaccagttcaactctgccattggcaagattcaggactccctgtcca
gcacaccatctgccctgggcaaactccaaaacgtggtgaaccagaatgcccaggctctgaacaccctg
gtgaagcaactttccagcaactttggagccatctcctctgtgctgaatgacatcctgagcagactgga
cccaccagaggctgaggtccagattgacagactgattacaggcagactccaatccctccaaacctatg
tgacccaacaacttatcagggctgctgagattagggcatctgccaacctggctgccaccaagatgagt
gagtgtgtgctgggacaaagcaagagggtggacttctgtggcaagggctaccacctgatgagttttcc
acagtctgcccctcatggagtggtgttcctgcatgtgacctatgtgcctgcccaggagaagaacttca
ccacagcccctgccatctgccatgatggcaaggctcactttccaagggagggagtgtttgtgagcaat
ggcacccactggtttgtgacccagaggaacttctatgaaccacagattatcaccacagacaacacctt
tgtgtctggcaactgtgatgtggtgattggcattgtgaacaacacagtctatgacccactccaacctg
aactggactccttcaaggaggaactggacaaatacttcaagaaccacaccagccctgatgtggacctg
ggagacatctctggcatcaatgcctctgtggtgaacatccagaaggagattgacagactgaatgaggt
ggctaagaacctgaatgagtccctgattgacctccaagaactgggcaaatatgaacaatacatcaagt
ggccatggtacatctggctgggcttcattgctggactgattgccattgtgatggtgaccataatgctg
tgttgtatgacctcctgttgttcctgtctgaaaggctgttgttcctgtggctcctgttgtaagtttga
tgaggatgactctgaacctgtgctgaaaggagtgaaactgcactacacctgactcgagctggtactgc
atgcacgcaatgctagctgcccctttcccgtcctgggtaccccgagtctcccccgacctcgggtccca
ggtatgctcccacctccacctgccccactcaccacctctgctagttccagacacctcccaagcacgca
gcaatgcagctcaaaacgcttagcctagccacacccccacgggaaacagcagtgattaacctttagca
ataaacgaaagtttaactaagctatactaaccccagggttggtcaatttcgtgccagccacaccctgg
agctagcaaaccgctgatcagcctcgactgtgccttctagttgccagccatctgttgtttgcccctcc
cccgtgccttccttgaccctggaaggtgccactcccactgtcctttcctaataaaatgaggaaattgc
atcgcattgtctgagtaggtgtcattctattctggggggtggggtggggcaggacagcaagggggagg
attgggaagacaatagcaggcatgctggggatgcggtgggctctatggcttctgaggcggaaagaacc
agctggggctctagggggtatccccacgcgccctgtagcggcgcattaagcgcggcgggtgtggtggt
tacgcgcagcgtgaccgctacacttgccagcgccctagcgcccgctcctttcgctttcttcccttcct
ttctcgccacgttcgccggctttccccgtcaagctctaaatcgggggctccctttagggttccgattt
agtgctttacggcacctcgaccccaaaaaacttgattagggtgatggttcacgtagtgggccatcgcc
ctgatagacggtttttcgccctttgacgttggagtccacgttctttaatagtggactcttgttccaaa
ctggaacaacactcaaccctatctcggtctattcttttgatttataagggattttgccgatttcggcc
tattggttaaaaaatgagctgatttaacaaaaatttaacgcgaattaattctgtggaatgtgtgtcag
ttagggtgtggaaagtccccaggctccccagcaggcagaagtatgcaaagcatgcatctcaattagtc
agcaaccaggtgtggaaagtccccaggctccccagcaggcagaagtatgcaaagcatgcatctcaatt
agtcagcaaccatagtcccgcccctaactccgcccatcccgcccctaactccgcccagttccgcccat
tctccgccccatggctgactaattttttttatttatgcagaggccgaggccgcctctgcctctgagct
attccagaagtagtgaggaggcttttttggaggcctaggcttttgcaaaaagctcccgggagcttgta
tatccattttcggatctgatcaagagacaggatgaggatcgtttcgcatgattgaacaagatggattg
cacgcaggttctccggccgcttgggtggagaggctattcggctatgactgggcacaacagacaatcgg
ctgctctgatgccgccgtgttccggctgtcagcgcaggggcgcccggttctttttgtcaagaccgacc
tgtccggtgccctgaatgaactgcaggacgaggcagcgcggctatcgtggctggccacgacgggcgtt
ccttgcgcagctgtgctcgacgttgtcactgaagcgggaagggactggctgctattgggcgaagtgcc
ggggcaggatctcctgtcatctcaccttgctcctgccgagaaagtatccatcatggctgatgcaatgc
ggcggctgcatacgcttgatccggctacctgcccattcgaccaccaagcgaaacatcgcatcgagcga
gcacgtactcggatggaagccggtcttgtcgatcaggatgatctggacgaagagcatcaggggctcgc
gccagccgaactgttcgccaggctcaaggcgcgcatgcccgacggcgaggatctcgtcgtgacccatg
gcgatgcctgcttgccgaatatcatggtggaaaatggccgcttttctggattcatcgactgtggccgg
ctgggtgtggcggaccgctatcaggacatagcgttggctacccgtgatattgctgaagagcttggcgg
cgaatgggctgaccgcttcctcgtgctttacggtatcgccgctcccgattcgcagcgcatcgccttct
atcgccttcttgacgagttcttctgagcgggactctggggttcgaaatgaccgaccaagcgacgccca
acctgccatcacgagatttcgattccaccgccgccttctatgaaaggttgggcttcggaatcgttttc
cgggacgccggctggatgatcctccagcgcggggatctcatgctggagttcttcgcccaccccaactt
gtttattgcagcttataatggttacaaataaagcaatagcatcacaaatttcacaaataaagcatttt
tttcactgcattctagttgtggtttgtccaaactcatcaatgtatcttatcatgtctgtataccgtcg
acctctagctagagcttggcgtaatcatggtcatagctgtttcctgtgtgaaattgttatccgctcac
aattccacacaacatacgagccggaagcataaagtgtaaagcctggggtgcctaatgagtgagctaac
tcacattaattgcgttgcgctcactgcccgctttccagtcgggaaacctgtcgtgccagctgcattaa
tgaatcggccaacgcgcggggagaggcggtttgcgtattgggcgctcttccgcttcctcgctcactga
ctcgctgcgctcggtcgttcggctgcggcgagcggtatcagctcactcaaaggcggtaatacggttat
ccacagaatcaggggataacgcaggaaagaacatgtgagcaaaaggccagcaaaaggccaggaaccgt
aaaaaggccgcgttgctggcgtttttccataggctccgcccccctgacgagcatcacaaaaatcgacg
ctcaagtcagaggtggcgaaacccgacaggactataaagataccaggcgtttccccctggaagctccc
tcgtgcgctctcctgttccgaccctgccgcttaccggatacctgtccgcctttctcccttcgggaagc
gtggcgctttctcatagctcacgctgtaggtatctcagttcggtgtaggtcgttcgctccaagctggg
ctgtgtgcacgaaccccccgttcagcccgaccgctgcgccttatccggtaactatcgtcttgagtcca
acccggtaagacacgacttatcgccactggcagcagccactggtaacaggattagcagagcgaggtat
gtaggcggtgctacagagttcttgaagtggtggcctaactacggctacactagaagaacagtatttgg
tatctgcgctctgctgaagccagttaccttcggaaaaagagttggtagctcttgatccggcaaacaaa
ccaccgctggtagcggtggtttttttgtttgcaagcagcagattacgcgcagaaaaaaaggatctcaa
gaagatcctttgatcttttctacggggtctgacgctcagtggaacgaaaactcacgttaagggatttt
ggtcatgagattatcaaaaaggatcttcacctagatccttttaaattaaaaatgaagttttaaatcaa
tctaaagtatatatgagtaaacttggtctgacagttaccaatgcttaatcagtgaggcacctatctca
gcgatctgtctatttcgttcatccatagttgcctgactccccgtcgtgtagataactacgatacggga
gggcttaccatctggccccagtgctgcaatgataccgcgagacccacgctcaccggctccagatttat
cagcaataaaccagccagccggaagggccgagcgcagaagtggtcctgcaactttatccgcctccatc
cagtctattaattgttgccgggaagctagagtaagtagttcgccagttaatagtttgcgcaacgttgt
tgccattgctacaggcatcgtggtgtcacgctcgtcgtttggtatggcttcattcagctccggttccc
aacgatcaaggcgagttacatgatcccccatgttgtgcaaaaaagcggttagctccttcggtcctccg
atcgttgtcagaagtaagttggccgcagtgttatcactcatggttatggcagcactgcataattctct
tactgtcatgccatccgtaagatgcttttctgtgactggtgagtactcaaccaagtcattctgagaat
agtgtatgcggcgaccgagttgctcttgcccggcgtcaatacgggataataccgcgccacatagcaga
actttaaaagtgctcatcattggaaaacgttcttcggggcgaaaactctcaaggatcttaccgctgtt
gagatccagttcgatgtaacccactcgtgcacccaactgatcttcagcatcttttactttcaccagcg
tttctgggtgagcaaaaacaggaaggcaaaatgccgcaaaaaagggaataagggcgacacggaaatgt
tgaatactcatactcttcctttttcaatattattgaagcatttatcagggttattgtctcatgagcgg
atacatatttgaatgtatttagaaaaataaacaaataggggttccgcgcacatttccccgaaaagtgc
cacctgacgtc
pZV05_SARS-CoV-2-UTR-spike_delta_HexaPro_S1_G637_SPY_tag
SEQ ID NO: 87
gacggatcgggagatctcccgatcccctatggtgcactctcagtacaatctgctctgatgccgcatag
ttaagccagtatctgctccctgcttgtgtgttggaggtcgctgagtagtgcgcgagcaaaatttaagc
tacaacaaggcaaggcttgaccgacaattgcatgaagaatctgcttagggttaggcgttttgcgctgc
ttcgcgatgtacgggccagatatacgcgttgacattgattattgactagttattaatagtaatcaatt
acggggtcattagttcatagcccatatatggagttccgcgttacataacttacggtaaatggcccgcc
tggctgaccgcccaacgacccccgcccattgacgtcaataatgacgtatgttcccatagtaacgccaa
tagggactttccattgacgtcaatgggtggagtatttacggtaaactgcccacttggcagtacatcaa
gtgtatcatatgccaagtacgccccctattgacgtcaatgacggtaaatggcccgcctggcattatgc
ccagtacatgaccttatgggactttcctacttggcagtacatctacgtattagtcatcgctattacca
tggtgatgcggttttggcagtacatcaatgggcgtggatagcggtttgactcacggggatttccaagt
ctccaccccattgacgtcaatgggagtttgttttggcaccaaaatcaacgggactttccaaaatgtcg
taacaactccgccccattgacgcaaatgggcggtaggcgtgtacggtgggaggtctatataagcagag
ctctctggctaactagagaacccactgcttactggcttatcgaaattaatacgactcactatagggag
acccaagctggctagccaccgagaataaactagtattcttctggtccccacagactcagagagaaccc
gccaccatgtttgtgttcctggtgctgctgccactggtgtccagccagtgtgtgaacctgaggaccag
gacccaacttcctcctgcctacaccaactccttcaccaggggagtctactaccctgacaaggtgttca
ggtcctctgtgctgcacagcacccaggacctgttcctgccattcttcagcaatgtgacctggttccat
gccatccatgtgtctggcaccaatggcaccaagaggtttgacaaccctgtgctgccattcaatgatgg
agtctactttgccagcacagagaagagcaacatcatcaggggctggatttttggcaccaccctggaca
gcaagacccagtccctgctgattgtgaacaatgccaccaatgtggtgattaaggtgtgtgagttccag
ttctgtaatgacccattcctggacgtctactaccacaagaacaacaagtcctggatggagtctggcgt
ctactcctctgccaacaactgtacctttgaatatgtgagccaaccattcctgatggacttggagggca
agcagggcaacttcaagaacctgagggagtttgtgttcaagaacattgatggctacttcaagatttac
agcaaacacacaccaatcaacctggtgagggacctgccacagggcttctctgccttggaaccactggt
ggacctgccaattggcatcaacatcaccaggttccagaccctgctggctctgcacaggtcctacctga
cacctggagactcctcctctggctggacagcaggagcagcagcctactatgtgggctacctccaacca
aggaccttcctgctgaaatacaatgagaatggcaccatcacagatgctgtggactgtgccctggaccc
actgtctgagaccaagtgtaccctgaaatccttcacagtggagaagggcatctaccagaccagcaact
tcagggtccaaccaacagagagcattgtgaggtttccaaacatcaccaacctgtgtccatttggagag
gtgttcaatgccaccaggtttgcctctgtctatgcctggaacaggaagaggattagcaactgtgtggc
tgactactctgtgctctacaactctgcctccttcagcaccttcaagtgttatggagtgagcccaacca
aactgaatgacctgtgtttcaccaatgtctatgctgactcctttgtgattaggggagatgaggtgaga
cagattgcccctggacaaacaggcaagattgctgactacaactacaaactgcctgatgacttcacagg
ctgtgtgattgcctggaacagcaacaacctggacagcaaggtgggaggcaactacaactacaggtaca
gactgttcaggaagagcaacctgaaaccatttgagagggacatcagcacagagatttaccaggctggc
agcaagccatgtaatggagtggagggcttcaactgttactttccactccaatcctatggcttccaacc
aaccaatggagtgggctaccaaccatacagggtggtggtgctgtcctttgaactgctccatgcccctg
ccacagtgtgtggaccaaagaagagcaccaacctggtgaagaacaagtgtgtgaacttcaacttcaat
ggactgacaggcacaggagtgctgacagagagcaacaagaagttcctgccattccaacagtttggcag
ggacattgctgacaccacagatgctgtgagggacccacagaccttggagattctggacatcacaccat
gttcctttggaggagtgtctgtgattacacctggcaccaacaccagcaaccaggtggctgtgctctac
cagggcgtgaactgtactgaggtgcctgtggctatccatgctgaccaacttacaccaacctggagggt
ctacagcacaggacgtggcgtgcctcatatcgtgatggtggacgcctacaagcgttacaagtgactcg
agctggtactgcatgcacgcaatgctagctgcccctttcccgtcctgggtaccccgagtctcccccga
cctcgggtcccaggtatgctcccacctccacctgccccactcaccacctctgctagttccagacacct
cccaagcacgcagcaatgcagctcaaaacgcttagcctagccacacccccacgggaaacagcagtgat
taacctttagcaataaacgaaagtttaactaagctatactaaccccagggttggtcaatttcgtgcca
gccacaccctggagctagcaaaccgctgatcagcctcgactgtgccttctagttgccagccatctgtt
gtttgcccctcccccgtgccttccttgaccctggaaggtgccactcccactgtcctttcctaataaaa
tgaggaaattgcatcgcattgtctgagtaggtgtcattctattctggggggtggggtggggcaggaca
gcaagggggaggattgggaagacaatagcaggcatgctggggatgcggtgggctctatggcttctgag
gcggaaagaaccagctggggctctagggggtatccccacgcgccctgtagcggcgcattaagcgcggc
gggtgtggtggttacgcgcagcgtgaccgctacacttgccagcgccctagcgcccgctcctttcgctt
tcttcccttcctttctcgccacgttcgccggctttccccgtcaagctctaaatcgggggctcccttta
gggttccgatttagtgctttacggcacctcgaccccaaaaaacttgattagggtgatggttcacgtag
tgggccatcgccctgatagacggtttttcgccctttgacgttggagtccacgttctttaatagtggac
tcttgttccaaactggaacaacactcaaccctatctcggtctattcttttgatttataagggattttg
ccgatttcggcctattggttaaaaaatgagctgatttaacaaaaatttaacgcgaattaattctgtgg
aatgtgtgtcagttagggtgtggaaagtccccaggctccccagcaggcagaagtatgcaaagcatgca
tctcaattagtcagcaaccaggtgtggaaagtccccaggctccccagcaggcagaagtatgcaaagca
tgcatctcaattagtcagcaaccatagtcccgcccctaactccgcccatcccgcccctaactccgccc
agttccgcccattctccgccccatggctgactaattttttttatttatgcagaggccgaggccgcctc
tgcctctgagctattccagaagtagtgaggaggcttttttggaggcctaggcttttgcaaaaagctcc
cgggagcttgtatatccattttcggatctgatcaagagacaggatgaggatcgtttcgcatgattgaa
caagatggattgcacgcaggttctccggccgcttgggtggagaggctattcggctatgactgggcaca
acagacaatcggctgctctgatgccgccgtgttccggctgtcagcgcaggggcgcccggttctttttg
tcaagaccgacctgtccggtgccctgaatgaactgcaggacgaggcagcgcggctatcgtggctggcc
acgacgggcgttccttgcgcagctgtgctcgacgttgtcactgaagcgggaagggactggctgctatt
gggcgaagtgccggggcaggatctcctgtcatctcaccttgctcctgccgagaaagtatccatcatgg
ctgatgcaatgcggcggctgcatacgcttgatccggctacctgcccattcgaccaccaagcgaaacat
cgcatcgagcgagcacgtactcggatggaagccggtcttgtcgatcaggatgatctggacgaagagca
tcaggggctcgcgccagccgaactgttcgccaggctcaaggcgcgcatgcccgacggcgaggatctcg
tcgtgacccatggcgatgcctgcttgccgaatatcatggtggaaaatggccgcttttctggattcatc
gactgtggccggctgggtgtggcggaccgctatcaggacatagcgttggctacccgtgatattgctga
agagcttggcggcgaatgggctgaccgcttcctcgtgctttacggtatcgccgctcccgattcgcagc
gcatcgccttctatcgccttcttgacgagttcttctgagcgggactctggggttcgaaatgaccgacc
aagcgacgcccaacctgccatcacgagatttcgattccaccgccgccttctatgaaaggttgggcttc
ggaatcgttttccgggacgccggctggatgatcctccagcgcggggatctcatgctggagttcttcgc
ccaccccaacttgtttattgcagcttataatggttacaaataaagcaatagcatcacaaatttcacaa
ataaagcatttttttcactgcattctagttgtggtttgtccaaactcatcaatgtatcttatcatgtc
tgtataccgtcgacctctagctagagcttggcgtaatcatggtcatagctgtttcctgtgtgaaattg
ttatccgctcacaattccacacaacatacgagccggaagcataaagtgtaaagcctggggtgcctaat
gagtgagctaactcacattaattgcgttgcgctcactgcccgctttccagtcgggaaacctgtcgtgc
cagctgcattaatgaatcggccaacgcgcggggagaggcggtttgcgtattgggcgctcttccgcttc
ctcgctcactgactcgctgcgctcggtcgttcggctgcggcgagcggtatcagctcactcaaaggcgg
taatacggttatccacagaatcaggggataacgcaggaaagaacatgtgagcaaaaggccagcaaaag
gccaggaaccgtaaaaaggccgcgttgctggcgtttttccataggctccgcccccctgacgagcatca
caaaaatcgacgctcaagtcagaggtggcgaaacccgacaggactataaagataccaggcgtttcccc
ctggaagctccctcgtgcgctctcctgttccgaccctgccgcttaccggatacctgtccgcctttctc
ccttcgggaagcgtggcgctttctcatagctcacgctgtaggtatctcagttcggtgtaggtcgttcg
ctccaagctgggctgtgtgcacgaaccccccgttcagcccgaccgctgcgccttatccggtaactatc
gtcttgagtccaacccggtaagacacgacttatcgccactggcagcagccactggtaacaggattagc
agagcgaggtatgtaggcggtgctacagagttcttgaagtggtggcctaactacggctacactagaag
aacagtatttggtatctgcgctctgctgaagccagttaccttcggaaaaagagttggtagctcttgat
ccggcaaacaaaccaccgctggtagcggtggtttttttgtttgcaagcagcagattacgcgcagaaaa
aaaggatctcaagaagatcctttgatcttttctacggggtctgacgctcagtggaacgaaaactcacg
ttaagggattttggtcatgagattatcaaaaaggatcttcacctagatccttttaaattaaaaatgaa
gttttaaatcaatctaaagtatatatgagtaaacttggtctgacagttaccaatgcttaatcagtgag
gcacctatctcagcgatctgtctatttcgttcatccatagttgcctgactccccgtcgtgtagataac
tacgatacgggagggcttaccatctggccccagtgctgcaatgataccgcgagacccacgctcaccgg
ctccagatttatcagcaataaaccagccagccggaagggccgagcgcagaagtggtcctgcaacttta
tccgcctccatccagtctattaattgttgccgggaagctagagtaagtagttcgccagttaatagttt
gcgcaacgttgttgccattgctacaggcatcgtggtgtcacgctcgtcgtttggtatggcttcattca
gctccggttcccaacgatcaaggcgagttacatgatcccccatgttgtgcaaaaaagcggttagctcc
ttcggtcctccgatcgttgtcagaagtaagttggccgcagtgttatcactcatggttatggcagcact
gcataattctcttactgtcatgccatccgtaagatgcttttctgtgactggtgagtactcaaccaagt
cattctgagaatagtgtatgcggcgaccgagttgctcttgcccggcgtcaatacgggataataccgcg
ccacatagcagaactttaaaagtgctcatcattggaaaacgttcttcggggcgaaaactctcaaggat
cttaccgctgttgagatccagttcgatgtaacccactcgtgcacccaactgatcttcagcatctttta
ctttcaccagcgtttctgggtgagcaaaaacaggaaggcaaaatgccgcaaaaaagggaataagggcg
acacggaaatgttgaatactcatactcttcctttttcaatattattgaagcatttatcagggttattg
tctcatgagcggatacatatttgaatgtatttagaaaaataaacaaataggggttccgcgcacatttc
cccgaaaagtgccacctgacgtc
pZV06_SARS-CoV-2-UTR-spike_delta_HexaPro_SPY_catcher_S638_S2
SEQ ID NO: 88
gacggatcgggagatctcccgatcccctatggtgcactctcagtacaatctgctctgatgccgcatag
ttaagccagtatctgctccctgcttgtgtgttggaggtcgctgagtagtgcgcgagcaaaatttaagc
tacaacaaggcaaggcttgaccgacaattgcatgaagaatctgcttagggttaggcgttttgcgctgc
ttcgcgatgtacgggccagatatacgcgttgacattgattattgactagttattaatagtaatcaatt
acggggtcattagttcatagcccatatatggagttccgcgttacataacttacggtaaatggcccgcc
tggctgaccgcccaacgacccccgcccattgacgtcaataatgacgtatgttcccatagtaacgccaa
tagggactttccattgacgtcaatgggtggagtatttacggtaaactgcccacttggcagtacatcaa
gtgtatcatatgccaagtacgccccctattgacgtcaatgacggtaaatggcccgcctggcattatgc
ccagtacatgaccttatgggactttcctacttggcagtacatctacgtattagtcatcgctattacca
tggtgatgcggttttggcagtacatcaatgggcgtggatagcggtttgactcacggggatttccaagt
ctccaccccattgacgtcaatgggagtttgttttggcaccaaaatcaacgggactttccaaaatgtcg
taacaactccgccccattgacgcaaatgggcggtaggcgtgtacggtgggaggtctatataagcagag
ctctctggctaactagagaacccactgcttactggcttatcgaaattaatacgactcactatagggag
acccaagctggctagccaccgagaataaactagtattcttctggtccccacagactcagagagaaccc
gccaccatgtttgtgttcctggtgctgctgccactggtgtccagcgtgaccacactgtccggactgtc
tggagagcagggaccatccggcgacatgaccacagaggaggattctgccacacacatcaagttcagca
agagggacgaggacggaagagagctggcaggagcaaccatggagctgagggatagctccggcaagacc
atcagcacatggatctccgacggccacgtgaaggatttctacctgtatcccggcaagtacacctttgt
ggagacagcagcaccagacggatatgaggtggcaacccctatcgagtttacagtgaacgaggacggac
aggtgaccgtggatggagaggcaacagagggcgatgcacacaccggcagcagcagcaacgtgttccag
accagggctggctgtctgattggagcagagcatgtgaacaactcctatgagtgtgacatcccaattgg
agcaggcatctgtgcctcctaccagacccagaccaacagcaggggctctgcatcttctgtggcaagcc
agagcatcattgcctacacaatgagtctgggagcagagaactctgtggcttacagcaacaacagcatt
gccatcccaaccaacttcaccatctctgtgaccacagagattctgcctgtgagtatgaccaagacctc
tgtggactgtacaatgtatatctgtggagacagcacagagtgtagcaacctgctgctccaatatggct
ccttctgtacccaacttaacagggctctgacaggcattgctgtggaacaggacaagaacacccaggag
gtgtttgcccaggtgaagcagatttacaagacacctccaatcaaggactttggaggcttcaacttcag
ccagattctgcctgacccaagcaagccaagcaagaggtcccctattgaggacctgctgttcaacaagg
tgaccctggctgatgctggcttcatcaagcaatatggagactgtctgggagacattgccgccagggac
ctgatttgtgcccagaagttcaatggactgacagtgctgcctccactgctgacagatgagatgattgc
ccaatacacctctgccctgctggctggcaccatcacctctggctggacctttggagcaggaccagccc
tccaaatcccatttccaatgcagatggcttacaggttcaatggcattggagtgacccagaatgtgctc
tatgagaaccagaaactgattgccaaccagttcaactctgccattggcaagattcaggactccctgtc
cagcacaccatctgccctgggcaaactccaaaacgtggtgaaccagaatgcccaggctctgaacaccc
tggtgaagcaactttccagcaactttggagccatctcctctgtgctgaatgacatcctgagcagactg
gacccaccagaggctgaggtccagattgacagactgattacaggcagactccaatccctccaaaccta
tgtgacccaacaacttatcagggctgctgagattagggcatctgccaacctggctgccaccaagatga
gtgagtgtgtgctgggacaaagcaagagggtggacttctgtggcaagggctaccacctgatgagtttt
ccacagtctgcccctcatggagtggtgttcctgcatgtgacctatgtgcctgcccaggagaagaactt
caccacagcccctgccatctgccatgatggcaaggctcactttccaagggagggagtgtttgtgagca
atggcacccactggtttgtgacccagaggaacttctatgaaccacagattatcaccacagacaacacc
tttgtgtctggcaactgtgatgtggtgattggcattgtgaacaacacagtctatgacccactccaacc
tgaactggactccttcaaggaggaactggacaaatacttcaagaaccacaccagccctgatgtggacc
tgggagacatctctggcatcaatgcctctgtggtgaacatccagaaggagattgacagactgaatgag
gtggctaagaacctgaatgagtccctgattgacctccaagaactgggcaaatatgaacaatacatcaa
gtggccatggtacatctggctgggcttcattgctggactgattgccattgtgatggtgaccataatgc
tgtgttgtatgacctcctgttgttcctgtctgaaaggctgttgttcctgtggctcctgttgtaagttt
gatgaggatgactctgaacctgtgctgaaaggagtgaaactgcactacacctgactcgagctggtact
gcatgcacgcaatgctagctgcccctttcccgtcctgggtaccccgagtctcccccgacctcgggtcc
caggtatgctcccacctccacctgccccactcaccacctctgctagttccagacacctcccaagcacg
cagcaatgcagctcaaaacgcttagcctagccacacccccacgggaaacagcagtgattaacctttag
caataaacgaaagtttaactaagctatactaaccccagggttggtcaatttcgtgccagccacaccct
ggagctagcaaaccgctgatcagcctcgactgtgccttctagttgccagccatctgttgtttgcccct
cccccgtgccttccttgaccctggaaggtgccactcccactgtcctttcctaataaaatgaggaaatt
gcatcgcattgtctgagtaggtgtcattctattctggggggtggggtggggcaggacagcaaggggga
ggattgggaagacaatagcaggcatgctggggatgcggtgggctctatggcttctgaggcggaaagaa
ccagctggggctctagggggtatccccacgcgccctgtagcggcgcattaagcgcggcgggtgtggtg
gttacgcgcagcgtgaccgctacacttgccagcgccctagcgcccgctcctttcgctttcttcccttc
ctttctcgccacgttcgccggctttccccgtcaagctctaaatcgggggctccctttagggttccgat
ttagtgctttacggcacctcgaccccaaaaaacttgattagggtgatggttcacgtagtgggccatcg
ccctgatagacggtttttcgccctttgacgttggagtccacgttctttaatagtggactcttgttcca
aactggaacaacactcaaccctatctcggtctattcttttgatttataagggattttgccgatttcgg
cctattggttaaaaaatgagctgatttaacaaaaatttaacgcgaattaattctgtggaatgtgtgtc
agttagggtgtggaaagtccccaggctccccagcaggcagaagtatgcaaagcatgcatctcaattag
tcagcaaccaggtgtggaaagtccccaggctccccagcaggcagaagtatgcaaagcatgcatctcaa
ttagtcagcaaccatagtcccgcccctaactccgcccatcccgcccctaactccgcccagttccgccc
attctccgccccatggctgactaattttttttatttatgcagaggccgaggccgcctctgcctctgag
ctattccagaagtagtgaggaggcttttttggaggcctaggcttttgcaaaaagctcccgggagcttg
tatatccattttcggatctgatcaagagacaggatgaggatcgtttcgcatgattgaacaagatggat
tgcacgcaggttctccggccgcttgggtggagaggctattcggctatgactgggcacaacagacaatc
ggctgctctgatgccgccgtgttccggctgtcagcgcaggggcgcccggttctttttgtcaagaccga
cctgtccggtgccctgaatgaactgcaggacgaggcagcgcggctatcgtggctggccacgacgggcg
ttccttgcgcagctgtgctcgacgttgtcactgaagcgggaagggactggctgctattgggcgaagtg
ccggggcaggatctcctgtcatctcaccttgctcctgccgagaaagtatccatcatggctgatgcaat
gcggcggctgcatacgcttgatccggctacctgcccattcgaccaccaagcgaaacatcgcatcgagc
gagcacgtactcggatggaagccggtcttgtcgatcaggatgatctggacgaagagcatcaggggctc
gcgccagccgaactgttcgccaggctcaaggcgcgcatgcccgacggcgaggatctcgtcgtgaccca
tggcgatgcctgcttgccgaatatcatggtggaaaatggccgcttttctggattcatcgactgtggcc
ggctgggtgtggcggaccgctatcaggacatagcgttggctacccgtgatattgctgaagagcttggc
ggcgaatgggctgaccgcttcctcgtgctttacggtatcgccgctcccgattcgcagcgcatcgcctt
ctatcgccttcttgacgagttcttctgagcgggactctggggttcgaaatgaccgaccaagcgacgcc
caacctgccatcacgagatttcgattccaccgccgccttctatgaaaggttgggcttcggaatcgttt
tccgggacgccggctggatgatcctccagcgcggggatctcatgctggagttcttcgcccaccccaac
ttgtttattgcagcttataatggttacaaataaagcaatagcatcacaaatttcacaaataaagcatt
tttttcactgcattctagttgtggtttgtccaaactcatcaatgtatcttatcatgtctgtataccgt
cgacctctagctagagcttggcgtaatcatggtcatagctgtttcctgtgtgaaattgttatccgctc
acaattccacacaacatacgagccggaagcataaagtgtaaagcctggggtgcctaatgagtgagcta
actcacattaattgcgttgcgctcactgcccgctttccagtcgggaaacctgtcgtgccagctgcatt
aatgaatcggccaacgcgcggggagaggcggtttgcgtattgggcgctcttccgcttcctcgctcact
gactcgctgcgctcggtcgttcggctgcggcgagcggtatcagctcactcaaaggcggtaatacggtt
atccacagaatcaggggataacgcaggaaagaacatgtgagcaaaaggccagcaaaaggccaggaacc
gtaaaaaggccgcgttgctggcgtttttccataggctccgcccccctgacgagcatcacaaaaatcga
cgctcaagtcagaggtggcgaaacccgacaggactataaagataccaggcgtttccccctggaagctc
cctcgtgcgctctcctgttccgaccctgccgcttaccggatacctgtccgcctttctcccttcgggaa
gcgtggcgctttctcatagctcacgctgtaggtatctcagttcggtgtaggtcgttcgctccaagctg
ggctgtgtgcacgaaccccccgttcagcccgaccgctgcgccttatccggtaactatcgtcttgagtc
caacccggtaagacacgacttatcgccactggcagcagccactggtaacaggattagcagagcgaggt
atgtaggcggtgctacagagttcttgaagtggtggcctaactacggctacactagaagaacagtattt
ggtatctgcgctctgctgaagccagttaccttcggaaaaagagttggtagctcttgatccggcaaaca
aaccaccgctggtagcggtggtttttttgtttgcaagcagcagattacgcgcagaaaaaaaggatctc
aagaagatcctttgatcttttctacggggtctgacgctcagtggaacgaaaactcacgttaagggatt
ttggtcatgagattatcaaaaaggatcttcacctagatccttttaaattaaaaatgaagttttaaatc
aatctaaagtatatatgagtaaacttggtctgacagttaccaatgcttaatcagtgaggcacctatct
cagcgatctgtctatttcgttcatccatagttgcctgactccccgtcgtgtagataactacgatacgg
gagggcttaccatctggccccagtgctgcaatgataccgcgagacccacgctcaccggctccagattt
atcagcaataaaccagccagccggaagggccgagcgcagaagtggtcctgcaactttatccgcctcca
tccagtctattaattgttgccgggaagctagagtaagtagttcgccagttaatagtttgcgcaacgtt
gttgccattgctacaggcatcgtggtgtcacgctcgtcgtttggtatggcttcattcagctccggttc
ccaacgatcaaggcgagttacatgatcccccatgttgtgcaaaaaagcggttagctccttcggtcctc
cgatcgttgtcagaagtaagttggccgcagtgttatcactcatggttatggcagcactgcataattct
cttactgtcatgccatccgtaagatgcttttctgtgactggtgagtactcaaccaagtcattctgaga
atagtgtatgcggcgaccgagttgctcttgcccggcgtcaatacgggataataccgcgccacatagca
gaactttaaaagtgctcatcattggaaaacgttcttcggggcgaaaactctcaaggatcttaccgctg
ttgagatccagttcgatgtaacccactcgtgcacccaactgatcttcagcatcttttactttcaccag
cgtttctgggtgagcaaaaacaggaaggcaaaatgccgcaaaaaagggaataagggcgacacggaaat
gttgaatactcatactcttcctttttcaatattattgaagcatttatcagggttattgtctcatgagc
ggatacatatttgaatgtatttagaaaaataaacaaataggggttccgcgcacatttccccgaaaagt
gccacctgacgtc
pZV07_SARS-CoV-2-UTR-spike_delta_HexaPro_S1_S683_furin
SEQ ID NO: 89
gacggatcgggagatctcccgatcccctatggtgcactctcagtacaatctgctctgatgccgcatag
ttaagccagtatctgctccctgcttgtgtgttggaggtcgctgagtagtgcgcgagcaaaatttaagc
tacaacaaggcaaggcttgaccgacaattgcatgaagaatctgcttagggttaggcgttttgcgctgc
ttcgcgatgtacgggccagatatacgcgttgacattgattattgactagttattaatagtaatcaatt
acggggtcattagttcatagcccatatatggagttccgcgttacataacttacggtaaatggcccgcc
tggctgaccgcccaacgacccccgcccattgacgtcaataatgacgtatgttcccatagtaacgccaa
tagggactttccattgacgtcaatgggtggagtatttacggtaaactgcccacttggcagtacatcaa
gtgtatcatatgccaagtacgccccctattgacgtcaatgacggtaaatggcccgcctggcattatgc
ccagtacatgaccttatgggactttcctacttggcagtacatctacgtattagtcatcgctattacca
tggtgatgcggttttggcagtacatcaatgggcgtggatagcggtttgactcacggggatttccaagt
ctccaccccattgacgtcaatgggagtttgttttggcaccaaaatcaacgggactttccaaaatgtcg
taacaactccgccccattgacgcaaatgggcggtaggcgtgtacggtgggaggtctatataagcagag
ctctctggctaactagagaacccactgcttactggcttatcgaaattaatacgactcactatagggag
acccaagctggctagccaccgagaataaactagtattcttctggtccccacagactcagagagaaccc
gccaccatgtttgtgttcctggtgctgctgccactggtgtccagccagtgtgtgaacctgaggaccag
gacccaacttcctcctgcctacaccaactccttcaccaggggagtctactaccctgacaaggtgttca
ggtcctctgtgctgcacagcacccaggacctgttcctgccattcttcagcaatgtgacctggttccat
gccatccatgtgtctggcaccaatggcaccaagaggtttgacaaccctgtgctgccattcaatgatgg
agtctactttgccagcacagagaagagcaacatcatcaggggctggatttttggcaccaccctggaca
gcaagacccagtccctgctgattgtgaacaatgccaccaatgtggtgattaaggtgtgtgagttccag
ttctgtaatgacccattcctggacgtctactaccacaagaacaacaagtcctggatggagtctggcgt
ctactcctctgccaacaactgtacctttgaatatgtgagccaaccattcctgatggacttggagggca
agcagggcaacttcaagaacctgagggagtttgtgttcaagaacattgatggctacttcaagatttac
agcaaacacacaccaatcaacctggtgagggacctgccacagggcttctctgccttggaaccactggt
ggacctgccaattggcatcaacatcaccaggttccagaccctgctggctctgcacaggtcctacctga
cacctggagactcctcctctggctggacagcaggagcagcagcctactatgtgggctacctccaacca
aggaccttcctgctgaaatacaatgagaatggcaccatcacagatgctgtggactgtgccctggaccc
actgtctgagaccaagtgtaccctgaaatccttcacagtggagaagggcatctaccagaccagcaact
tcagggtccaaccaacagagagcattgtgaggtttccaaacatcaccaacctgtgtccatttggagag
gtgttcaatgccaccaggtttgcctctgtctatgcctggaacaggaagaggattagcaactgtgtggc
tgactactctgtgctctacaactctgcctccttcagcaccttcaagtgttatggagtgagcccaacca
aactgaatgacctgtgtttcaccaatgtctatgctgactcctttgtgattaggggagatgaggtgaga
cagattgcccctggacaaacaggcaagattgctgactacaactacaaactgcctgatgacttcacagg
ctgtgtgattgcctggaacagcaacaacctggacagcaaggtgggaggcaactacaactacaggtaca
gactgttcaggaagagcaacctgaaaccatttgagagggacatcagcacagagatttaccaggctggc
agcaagccatgtaatggagtggagggcttcaactgttactttccactccaatcctatggcttccaacc
aaccaatggagtgggctaccaaccatacagggtggtggtgctgtcctttgaactgctccatgcccctg
ccacagtgtgtggaccaaagaagagcaccaacctggtgaagaacaagtgtgtgaacttcaacttcaat
ggactgacaggcacaggagtgctgacagagagcaacaagaagttcctgccattccaacagtttggcag
ggacattgctgacaccacagatgctgtgagggacccacagaccttggagattctggacatcacaccat
gttcctttggaggagtgtctgtgattacacctggcaccaacaccagcaaccaggtggctgtgctctac
cagggcgtgaactgtactgaggtgcctgtggctatccatgctgaccaacttacaccaacctggagggt
ctacagcacaggaagcaacgtgttccagaccagggctggctgtctgattggagcagagcatgtgaaca
actcctatgagtgtgacatcccaattggagcaggcatctgtgcctcctaccagacccagaccaacagc
aggggctctgcatcttgactcgagctggtactgcatgcacgcaatgctagctgcccctttcccgtcct
gggtaccccgagtctcccccgacctcgggtcccaggtatgctcccacctccacctgccccactcacca
cctctgctagttccagacacctcccaagcacgcagcaatgcagctcaaaacgcttagcctagccacac
ccccacgggaaacagcagtgattaacctttagcaataaacgaaagtttaactaagctatactaacccc
agggttggtcaatttcgtgccagccacaccctggagctagcaaaccgctgatcagcctcgactgtgcc
ttctagttgccagccatctgttgtttgcccctcccccgtgccttccttgaccctggaaggtgccactc
ccactgtcctttcctaataaaatgaggaaattgcatcgcattgtctgagtaggtgtcattctattctg
gggggtggggtggggcaggacagcaagggggaggattgggaagacaatagcaggcatgctggggatgc
ggtgggctctatggcttctgaggcggaaagaaccagctggggctctagggggtatccccacgcgccct
gtagcggcgcattaagcgcggcgggtgtggtggttacgcgcagcgtgaccgctacacttgccagcgcc
ctagcgcccgctcctttcgctttcttcccttcctttctcgccacgttcgccggctttccccgtcaagc
tctaaatcgggggctccctttagggttccgatttagtgctttacggcacctcgaccccaaaaaacttg
attagggtgatggttcacgtagtgggccatcgccctgatagacggtttttcgccctttgacgttggag
tccacgttctttaatagtggactcttgttccaaactggaacaacactcaaccctatctcggtctattc
ttttgatttataagggattttgccgatttcggcctattggttaaaaaatgagctgatttaacaaaaat
ttaacgcgaattaattctgtggaatgtgtgtcagttagggtgtggaaagtccccaggctccccagcag
gcagaagtatgcaaagcatgcatctcaattagtcagcaaccaggtgtggaaagtccccaggctcccca
gcaggcagaagtatgcaaagcatgcatctcaattagtcagcaaccatagtcccgcccctaactccgcc
catcccgcccctaactccgcccagttccgcccattctccgccccatggctgactaattttttttattt
atgcagaggccgaggccgcctctgcctctgagctattccagaagtagtgaggaggcttttttggaggc
ctaggcttttgcaaaaagctcccgggagcttgtatatccattttcggatctgatcaagagacaggatg
aggatcgtttcgcatgattgaacaagatggattgcacgcaggttctccggccgcttgggtggagaggc
tattcggctatgactgggcacaacagacaatcggctgctctgatgccgccgtgttccggctgtcagcg
caggggcgcccggttctttttgtcaagaccgacctgtccggtgccctgaatgaactgcaggacgaggc
agcgcggctatcgtggctggccacgacgggcgttccttgcgcagctgtgctcgacgttgtcactgaag
cgggaagggactggctgctattgggcgaagtgccggggcaggatctcctgtcatctcaccttgctcct
gccgagaaagtatccatcatggctgatgcaatgcggcggctgcatacgcttgatccggctacctgccc
attcgaccaccaagcgaaacatcgcatcgagcgagcacgtactcggatggaagccggtcttgtcgatc
aggatgatctggacgaagagcatcaggggctcgcgccagccgaactgttcgccaggctcaaggcgcgc
atgcccgacggcgaggatctcgtcgtgacccatggcgatgcctgcttgccgaatatcatggtggaaaa
tggccgcttttctggattcatcgactgtggccggctgggtgtggcggaccgctatcaggacatagcgt
tggctacccgtgatattgctgaagagcttggcggcgaatgggctgaccgcttcctcgtgctttacggt
atcgccgctcccgattcgcagcgcatcgccttctatcgccttcttgacgagttcttctgagcgggact
ctggggttcgaaatgaccgaccaagcgacgcccaacctgccatcacgagatttcgattccaccgccgc
cttctatgaaaggttgggcttcggaatcgttttccgggacgccggctggatgatcctccagcgcgggg
atctcatgctggagttcttcgcccaccccaacttgtttattgcagcttataatggttacaaataaagc
aatagcatcacaaatttcacaaataaagcatttttttcactgcattctagttgtggtttgtccaaact
catcaatgtatcttatcatgtctgtataccgtcgacctctagctagagcttggcgtaatcatggtcat
agctgtttcctgtgtgaaattgttatccgctcacaattccacacaacatacgagccggaagcataaag
tgtaaagcctggggtgcctaatgagtgagctaactcacattaattgcgttgcgctcactgcccgcttt
ccagtcgggaaacctgtcgtgccagctgcattaatgaatcggccaacgcgcggggagaggcggtttgc
gtattgggcgctcttccgcttcctcgctcactgactcgctgcgctcggtcgttcggctgcggcgagcg
gtatcagctcactcaaaggcggtaatacggttatccacagaatcaggggataacgcaggaaagaacat
gtgagcaaaaggccagcaaaaggccaggaaccgtaaaaaggccgcgttgctggcgtttttccataggc
tccgcccccctgacgagcatcacaaaaatcgacgctcaagtcagaggtggcgaaacccgacaggacta
taaagataccaggcgtttccccctggaagctccctcgtgcgctctcctgttccgaccctgccgcttac
cggatacctgtccgcctttctcccttcgggaagcgtggcgctttctcatagctcacgctgtaggtatc
tcagttcggtgtaggtcgttcgctccaagctgggctgtgtgcacgaaccccccgttcagcccgaccgc
tgcgccttatccggtaactatcgtcttgagtccaacccggtaagacacgacttatcgccactggcagc
agccactggtaacaggattagcagagcgaggtatgtaggcggtgctacagagttcttgaagtggtggc
ctaactacggctacactagaagaacagtatttggtatctgcgctctgctgaagccagttaccttcgga
aaaagagttggtagctcttgatccggcaaacaaaccaccgctggtagcggtggtttttttgtttgcaa
gcagcagattacgcgcagaaaaaaaggatctcaagaagatcctttgatcttttctacggggtctgacg
ctcagtggaacgaaaactcacgttaagggattttggtcatgagattatcaaaaaggatcttcacctag
atccttttaaattaaaaatgaagttttaaatcaatctaaagtatatatgagtaaacttggtctgacag
ttaccaatgcttaatcagtgaggcacctatctcagcgatctgtctatttcgttcatccatagttgcct
gactccccgtcgtgtagataactacgatacgggagggcttaccatctggccccagtgctgcaatgata
ccgcgagacccacgctcaccggctccagatttatcagcaataaaccagccagccggaagggccgagcg
cagaagtggtcctgcaactttatccgcctccatccagtctattaattgttgccgggaagctagagtaa
gtagttcgccagttaatagtttgcgcaacgttgttgccattgctacaggcatcgtggtgtcacgctcg
tcgtttggtatggcttcattcagctccggttcccaacgatcaaggcgagttacatgatcccccatgtt
gtgcaaaaaagcggttagctccttcggtcctccgatcgttgtcagaagtaagttggccgcagtgttat
cactcatggttatggcagcactgcataattctcttactgtcatgccatccgtaagatgcttttctgtg
actggtgagtactcaaccaagtcattctgagaatagtgtatgcggcgaccgagttgctcttgcccggc
gtcaatacgggataataccgcgccacatagcagaactttaaaagtgctcatcattggaaaacgttctt
cggggcgaaaactctcaaggatcttaccgctgttgagatccagttcgatgtaacccactcgtgcaccc
aactgatcttcagcatcttttactttcaccagcgtttctgggtgagcaaaaacaggaaggcaaaatgc
cgcaaaaaagggaataagggcgacacggaaatgttgaatactcatactcttcctttttcaatattatt
gaagcatttatcagggttattgtctcatgagcggatacatatttgaatgtatttagaaaaataaacaa
ataggggttccgcgcacatttccccgaaaagtgccacctgacgtc
pZV08_SARS-CoV-2-UTR-spike_delta_HexaPro_S684_S2
SEQ ID NO: 90
gacggatcgggagatctcccgatcccctatggtgcactctcagtacaatctgctctgatgccgcatag
ttaagccagtatctgctccctgcttgtgtgttggaggtcgctgagtagtgcgcgagcaaaatttaagc
tacaacaaggcaaggcttgaccgacaattgcatgaagaatctgcttagggttaggcgttttgcgctgc
ttcgcgatgtacgggccagatatacgcgttgacattgattattgactagttattaatagtaatcaatt
acggggtcattagttcatagcccatatatggagttccgcgttacataacttacggtaaatggcccgcc
tggctgaccgcccaacgacccccgcccattgacgtcaataatgacgtatgttcccatagtaacgccaa
tagggactttccattgacgtcaatgggtggagtatttacggtaaactgcccacttggcagtacatcaa
gtgtatcatatgccaagtacgccccctattgacgtcaatgacggtaaatggcccgcctggcattatgc
ccagtacatgaccttatgggactttcctacttggcagtacatctacgtattagtcatcgctattacca
tggtgatgcggttttggcagtacatcaatgggcgtggatagcggtttgactcacggggatttccaagt
ctccaccccattgacgtcaatgggagtttgttttggcaccaaaatcaacgggactttccaaaatgtcg
taacaactccgccccattgacgcaaatgggcggtaggcgtgtacggtgggaggtctatataagcagag
ctctctggctaactagagaacccactgcttactggcttatcgaaattaatacgactcactatagggag
acccaagctggctagccaccgagaataaactagtattcttctggtccccacagactcagagagaaccc
gccaccatgtttgtgttcctggtgctgctgccactggtgtccagctctgtggcaagccagagcatcat
tgcctacacaatgagtctgggagcagagaactctgtggcttacagcaacaacagcattgccatcccaa
ccaacttcaccatctctgtgaccacagagattctgcctgtgagtatgaccaagacctctgtggactgt
acaatgtatatctgtggagacagcacagagtgtagcaacctgctgctccaatatggctccttctgtac
ccaacttaacagggctctgacaggcattgctgtggaacaggacaagaacacccaggaggtgtttgccc
aggtgaagcagatttacaagacacctccaatcaaggactttggaggcttcaacttcagccagattctg
cctgacccaagcaagccaagcaagaggtcccctattgaggacctgctgttcaacaaggtgaccctggc
tgatgctggcttcatcaagcaatatggagactgtctgggagacattgccgccagggacctgatttgtg
cccagaagttcaatggactgacagtgctgcctccactgctgacagatgagatgattgcccaatacacc
tctgccctgctggctggcaccatcacctctggctggacctttggagcaggaccagccctccaaatccc
atttccaatgcagatggcttacaggttcaatggcattggagtgacccagaatgtgctctatgagaacc
agaaactgattgccaaccagttcaactctgccattggcaagattcaggactccctgtccagcacacca
tctgccctgggcaaactccaaaacgtggtgaaccagaatgcccaggctctgaacaccctggtgaagca
actttccagcaactttggagccatctcctctgtgctgaatgacatcctgagcagactggacccaccag
aggctgaggtccagattgacagactgattacaggcagactccaatccctccaaacctatgtgacccaa
caacttatcagggctgctgagattagggcatctgccaacctggctgccaccaagatgagtgagtgtgt
gctgggacaaagcaagagggtggacttctgtggcaagggctaccacctgatgagttttccacagtctg
cccctcatggagtggtgttcctgcatgtgacctatgtgcctgcccaggagaagaacttcaccacagcc
cctgccatctgccatgatggcaaggctcactttccaagggagggagtgtttgtgagcaatggcaccca
ctggtttgtgacccagaggaacttctatgaaccacagattatcaccacagacaacacctttgtgtctg
gcaactgtgatgtggtgattggcattgtgaacaacacagtctatgacccactccaacctgaactggac
tccttcaaggaggaactggacaaatacttcaagaaccacaccagccctgatgtggacctgggagacat
ctctggcatcaatgcctctgtggtgaacatccagaaggagattgacagactgaatgaggtggctaaga
acctgaatgagtccctgattgacctccaagaactgggcaaatatgaacaatacatcaagtggccatgg
tacatctggctgggcttcattgctggactgattgccattgtgatggtgaccataatgctgtgttgtat
gacctcctgttgttcctgtctgaaaggctgttgttcctgtggctcctgttgtaagtttgatgaggatg
actctgaacctgtgctgaaaggagtgaaactgcactacacctgactcgagctggtactgcatgcacgc
aatgctagctgcccctttcccgtcctgggtaccccgagtctcccccgacctcgggtcccaggtatgct
cccacctccacctgccccactcaccacctctgctagttccagacacctcccaagcacgcagcaatgca
gctcaaaacgcttagcctagccacacccccacgggaaacagcagtgattaacctttagcaataaacga
aagtttaactaagctatactaaccccagggttggtcaatttcgtgccagccacaccctggagctagca
aaccgctgatcagcctcgactgtgccttctagttgccagccatctgttgtttgcccctcccccgtgcc
ttccttgaccctggaaggtgccactcccactgtcctttcctaataaaatgaggaaattgcatcgcatt
gtctgagtaggtgtcattctattctggggggtggggtggggcaggacagcaagggggaggattgggaa
gacaatagcaggcatgctggggatgcggtgggctctatggcttctgaggcggaaagaaccagctgggg
ctctagggggtatccccacgcgccctgtagcggcgcattaagcgcggcgggtgtggtggttacgcgca
gcgtgaccgctacacttgccagcgccctagcgcccgctcctttcgctttcttcccttcctttctcgcc
acgttcgccggctttccccgtcaagctctaaatcgggggctccctttagggttccgatttagtgcttt
acggcacctcgaccccaaaaaacttgattagggtgatggttcacgtagtgggccatcgccctgataga
cggtttttcgccctttgacgttggagtccacgttctttaatagtggactcttgttccaaactggaaca
acactcaaccctatctcggtctattcttttgatttataagggattttgccgatttcggcctattggtt
aaaaaatgagctgatttaacaaaaatttaacgcgaattaattctgtggaatgtgtgtcagttagggtg
tggaaagtccccaggctccccagcaggcagaagtatgcaaagcatgcatctcaattagtcagcaacca
ggtgtggaaagtccccaggctccccagcaggcagaagtatgcaaagcatgcatctcaattagtcagca
accatagtcccgcccctaactccgcccatcccgcccctaactccgcccagttccgcccattctccgcc
ccatggctgactaattttttttatttatgcagaggccgaggccgcctctgcctctgagctattccaga
agtagtgaggaggcttttttggaggcctaggcttttgcaaaaagctcccgggagcttgtatatccatt
ttcggatctgatcaagagacaggatgaggatcgtttcgcatgattgaacaagatggattgcacgcagg
ttctccggccgcttgggtggagaggctattcggctatgactgggcacaacagacaatcggctgctctg
atgccgccgtgttccggctgtcagcgcaggggcgcccggttctttttgtcaagaccgacctgtccggt
gccctgaatgaactgcaggacgaggcagcgcggctatcgtggctggccacgacgggcgttccttgcgc
agctgtgctcgacgttgtcactgaagcgggaagggactggctgctattgggcgaagtgccggggcagg
atctcctgtcatctcaccttgctcctgccgagaaagtatccatcatggctgatgcaatgcggcggctg
catacgcttgatccggctacctgcccattcgaccaccaagcgaaacatcgcatcgagcgagcacgtac
tcggatggaagccggtcttgtcgatcaggatgatctggacgaagagcatcaggggctcgcgccagccg
aactgttcgccaggctcaaggcgcgcatgcccgacggcgaggatctcgtcgtgacccatggcgatgcc
tgcttgccgaatatcatggtggaaaatggccgcttttctggattcatcgactgtggccggctgggtgt
ggcggaccgctatcaggacatagcgttggctacccgtgatattgctgaagagcttggcggcgaatggg
ctgaccgcttcctcgtgctttacggtatcgccgctcccgattcgcagcgcatcgccttctatcgcctt
cttgacgagttcttctgagcgggactctggggttcgaaatgaccgaccaagcgacgcccaacctgcca
tcacgagatttcgattccaccgccgccttctatgaaaggttgggcttcggaatcgttttccgggacgc
cggctggatgatcctccagcgcggggatctcatgctggagttcttcgcccaccccaacttgtttattg
cagcttataatggttacaaataaagcaatagcatcacaaatttcacaaataaagcatttttttcactg
cattctagttgtggtttgtccaaactcatcaatgtatcttatcatgtctgtataccgtcgacctctag
ctagagcttggcgtaatcatggtcatagctgtttcctgtgtgaaattgttatccgctcacaattccac
acaacatacgagccggaagcataaagtgtaaagcctggggtgcctaatgagtgagctaactcacatta
attgcgttgcgctcactgcccgctttccagtcgggaaacctgtcgtgccagctgcattaatgaatcgg
ccaacgcgcggggagaggcggtttgcgtattgggcgctcttccgcttcctcgctcactgactcgctgc
gctcggtcgttcggctgcggcgagcggtatcagctcactcaaaggcggtaatacggttatccacagaa
tcaggggataacgcaggaaagaacatgtgagcaaaaggccagcaaaaggccaggaaccgtaaaaaggc
cgcgttgctggcgtttttccataggctccgcccccctgacgagcatcacaaaaatcgacgctcaagtc
agaggtggcgaaacccgacaggactataaagataccaggcgtttccccctggaagctccctcgtgcgc
tctcctgttccgaccctgccgcttaccggatacctgtccgcctttctcccttcgggaagcgtggcgct
ttctcatagctcacgctgtaggtatctcagttcggtgtaggtcgttcgctccaagctgggctgtgtgc
acgaaccccccgttcagcccgaccgctgcgccttatccggtaactatcgtcttgagtccaacccggta
agacacgacttatcgccactggcagcagccactggtaacaggattagcagagcgaggtatgtaggcgg
tgctacagagttcttgaagtggtggcctaactacggctacactagaagaacagtatttggtatctgcg
ctctgctgaagccagttaccttcggaaaaagagttggtagctcttgatccggcaaacaaaccaccgct
ggtagcggtggtttttttgtttgcaagcagcagattacgcgcagaaaaaaaggatctcaagaagatcc
tttgatcttttctacggggtctgacgctcagtggaacgaaaactcacgttaagggattttggtcatga
gattatcaaaaaggatcttcacctagatccttttaaattaaaaatgaagttttaaatcaatctaaagt
atatatgagtaaacttggtctgacagttaccaatgcttaatcagtgaggcacctatctcagcgatctg
tctatttcgttcatccatagttgcctgactccccgtcgtgtagataactacgatacgggagggcttac
catctggccccagtgctgcaatgataccgcgagacccacgctcaccggctccagatttatcagcaata
aaccagccagccggaagggccgagcgcagaagtggtcctgcaactttatccgcctccatccagtctat
taattgttgccgggaagctagagtaagtagttcgccagttaatagtttgcgcaacgttgttgccattg
ctacaggcatcgtggtgtcacgctcgtcgtttggtatggcttcattcagctccggttcccaacgatca
aggcgagttacatgatcccccatgttgtgcaaaaaagcggttagctccttcggtcctccgatcgttgt
cagaagtaagttggccgcagtgttatcactcatggttatggcagcactgcataattctcttactgtca
tgccatccgtaagatgcttttctgtgactggtgagtactcaaccaagtcattctgagaatagtgtatg
cggcgaccgagttgctcttgcccggcgtcaatacgggataataccgcgccacatagcagaactttaaa
agtgctcatcattggaaaacgttcttcggggcgaaaactctcaaggatcttaccgctgttgagatcca
gttcgatgtaacccactcgtgcacccaactgatcttcagcatcttttactttcaccagcgtttctggg
tgagcaaaaacaggaaggcaaaatgccgcaaaaaagggaataagggcgacacggaaatgttgaatact
catactcttcctttttcaatattattgaagcatttatcagggttattgtctcatgagcggatacatat
ttgaatgtatttagaaaaataaacaaataggggttccgcgcacatttccccgaaaagtgccacctgac
gtc
pZV09_SARS-CoV-2-UTR-spike_delta_HexaPro_S684_S2_del_C19
SEQ ID NO: 91
gacggatcgggagatctcccgatcccctatggtgcactctcagtacaatctgctctgatgccgcatag
ttaagccagtatctgctccctgcttgtgtgttggaggtcgctgagtagtgcgcgagcaaaatttaagc
tacaacaaggcaaggcttgaccgacaattgcatgaagaatctgcttagggttaggcgttttgcgctgc
ttcgcgatgtacgggccagatatacgcgttgacattgattattgactagttattaatagtaatcaatt
acggggtcattagttcatagcccatatatggagttccgcgttacataacttacggtaaatggcccgcc
tggctgaccgcccaacgacccccgcccattgacgtcaataatgacgtatgttcccatagtaacgccaa
tagggactttccattgacgtcaatgggtggagtatttacggtaaactgcccacttggcagtacatcaa
gtgtatcatatgccaagtacgccccctattgacgtcaatgacggtaaatggcccgcctggcattatgc
ccagtacatgaccttatgggactttcctacttggcagtacatctacgtattagtcatcgctattacca
tggtgatgcggttttggcagtacatcaatgggcgtggatagcggtttgactcacggggatttccaagt
ctccaccccattgacgtcaatgggagtttgttttggcaccaaaatcaacgggactttccaaaatgtcg
taacaactccgccccattgacgcaaatgggcggtaggcgtgtacggtgggaggtctatataagcagag
ctctctggctaactagagaacccactgcttactggcttatcgaaattaatacgactcactatagggag
acccaagctggctagccaccgagaataaactagtattcttctggtccccacagactcagagagaaccc
gccaccatgtttgtgttcctggtgctgctgccactggtgtccagctctgtggcaagccagagcatcat
tgcctacacaatgagtctgggagcagagaactctgtggcttacagcaacaacagcattgccatcccaa
ccaacttcaccatctctgtgaccacagagattctgcctgtgagtatgaccaagacctctgtggactgt
acaatgtatatctgtggagacagcacagagtgtagcaacctgctgctccaatatggctccttctgtac
ccaacttaacagggctctgacaggcattgctgtggaacaggacaagaacacccaggaggtgtttgccc
aggtgaagcagatttacaagacacctccaatcaaggactttggaggcttcaacttcagccagattctg
cctgacccaagcaagccaagcaagaggtcccctattgaggacctgctgttcaacaaggtgaccctggc
tgatgctggcttcatcaagcaatatggagactgtctgggagacattgccgccagggacctgatttgtg
cccagaagttcaatggactgacagtgctgcctccactgctgacagatgagatgattgcccaatacacc
tctgccctgctggctggcaccatcacctctggctggacctttggagcaggaccagccctccaaatccc
atttccaatgcagatggcttacaggttcaatggcattggagtgacccagaatgtgctctatgagaacc
agaaactgattgccaaccagttcaactctgccattggcaagattcaggactccctgtccagcacacca
tctgccctgggcaaactccaaaacgtggtgaaccagaatgcccaggctctgaacaccctggtgaagca
actttccagcaactttggagccatctcctctgtgctgaatgacatcctgagcagactggacccaccag
aggctgaggtccagattgacagactgattacaggcagactccaatccctccaaacctatgtgacccaa
caacttatcagggctgctgagattagggcatctgccaacctggctgccaccaagatgagtgagtgtgt
gctgggacaaagcaagagggtggacttctgtggcaagggctaccacctgatgagttttccacagtctg
cccctcatggagtggtgttcctgcatgtgacctatgtgcctgcccaggagaagaacttcaccacagcc
cctgccatctgccatgatggcaaggctcactttccaagggagggagtgtttgtgagcaatggcaccca
ctggtttgtgacccagaggaacttctatgaaccacagattatcaccacagacaacacctttgtgtctg
gcaactgtgatgtggtgattggcattgtgaacaacacagtctatgacccactccaacctgaactggac
tccttcaaggaggaactggacaaatacttcaagaaccacaccagccctgatgtggacctgggagacat
ctctggcatcaatgcctctgtggtgaacatccagaaggagattgacagactgaatgaggtggctaaga
acctgaatgagtccctgattgacctccaagaactgggcaaatatgaacaatacatcaagtggccatgg
tacatctggctgggcttcattgctggactgattgccattgtgatggtgaccataatgctgtgttgtat
gacctcctgttgttcctgtctgaaaggctgttgttcctgtggctcctgttgttgactcgagctggtac
tgcatgcacgcaatgctagctgcccctttcccgtcctgggtaccccgagtctcccccgacctcgggtc
ccaggtatgctcccacctccacctgccccactcaccacctctgctagttccagacacctcccaagcac
gcagcaatgcagctcaaaacgcttagcctagccacacccccacgggaaacagcagtgattaaccttta
gcaataaacgaaagtttaactaagctatactaaccccagggttggtcaatttcgtgccagccacaccc
tggagctagcaaaccgctgatcagcctcgactgtgccttctagttgccagccatctgttgtttgcccc
tcccccgtgccttccttgaccctggaaggtgccactcccactgtcctttcctaataaaatgaggaaat
tgcatcgcattgtctgagtaggtgtcattctattctggggggtggggtggggcaggacagcaaggggg
aggattgggaagacaatagcaggcatgctggggatgcggtgggctctatggcttctgaggcggaaaga
accagctggggctctagggggtatccccacgcgccctgtagcggcgcattaagcgcggcgggtgtggt
ggttacgcgcagcgtgaccgctacacttgccagcgccctagcgcccgctcctttcgctttcttccctt
cctttctcgccacgttcgccggctttccccgtcaagctctaaatcgggggctccctttagggttccga
tttagtgctttacggcacctcgaccccaaaaaacttgattagggtgatggttcacgtagtgggccatc
gccctgatagacggtttttcgccctttgacgttggagtccacgttctttaatagtggactcttgttcc
aaactggaacaacactcaaccctatctcggtctattcttttgatttataagggattttgccgatttcg
gcctattggttaaaaaatgagctgatttaacaaaaatttaacgcgaattaattctgtggaatgtgtgt
cagttagggtgtggaaagtccccaggctccccagcaggcagaagtatgcaaagcatgcatctcaatta
gtcagcaaccaggtgtggaaagtccccaggctccccagcaggcagaagtatgcaaagcatgcatctca
attagtcagcaaccatagtcccgcccctaactccgcccatcccgcccctaactccgcccagttccgcc
cattctccgccccatggctgactaattttttttatttatgcagaggccgaggccgcctctgcctctga
gctattccagaagtagtgaggaggcttttttggaggcctaggcttttgcaaaaagctcccgggagctt
gtatatccattttcggatctgatcaagagacaggatgaggatcgtttcgcatgattgaacaagatgga
ttgcacgcaggttctccggccgcttgggtggagaggctattcggctatgactgggcacaacagacaat
cggctgctctgatgccgccgtgttccggctgtcagcgcaggggcgcccggttctttttgtcaagaccg
acctgtccggtgccctgaatgaactgcaggacgaggcagcgcggctatcgtggctggccacgacgggc
gttccttgcgcagctgtgctcgacgttgtcactgaagcgggaagggactggctgctattgggcgaagt
gccggggcaggatctcctgtcatctcaccttgctcctgccgagaaagtatccatcatggctgatgcaa
tgcggcggctgcatacgcttgatccggctacctgcccattcgaccaccaagcgaaacatcgcatcgag
cgagcacgtactcggatggaagccggtcttgtcgatcaggatgatctggacgaagagcatcaggggct
cgcgccagccgaactgttcgccaggctcaaggcgcgcatgcccgacggcgaggatctcgtcgtgaccc
atggcgatgcctgcttgccgaatatcatggtggaaaatggccgcttttctggattcatcgactgtggc
cggctgggtgtggcggaccgctatcaggacatagcgttggctacccgtgatattgctgaagagcttgg
cggcgaatgggctgaccgcttcctcgtgctttacggtatcgccgctcccgattcgcagcgcatcgcct
tctatcgccttcttgacgagttcttctgagcgggactctggggttcgaaatgaccgaccaagcgacgc
ccaacctgccatcacgagatttcgattccaccgccgccttctatgaaaggttgggcttcggaatcgtt
ttccgggacgccggctggatgatcctccagcgcggggatctcatgctggagttcttcgcccaccccaa
cttgtttattgcagcttataatggttacaaataaagcaatagcatcacaaatttcacaaataaagcat
ttttttcactgcattctagttgtggtttgtccaaactcatcaatgtatcttatcatgtctgtataccg
tcgacctctagctagagcttggcgtaatcatggtcatagctgtttcctgtgtgaaattgttatccgct
cacaattccacacaacatacgagccggaagcataaagtgtaaagcctggggtgcctaatgagtgagct
aactcacattaattgcgttgcgctcactgcccgctttccagtcgggaaacctgtcgtgccagctgcat
taatgaatcggccaacgcgcggggagaggcggtttgcgtattgggcgctcttccgcttcctcgctcac
tgactcgctgcgctcggtcgttcggctgcggcgagcggtatcagctcactcaaaggcggtaatacggt
tatccacagaatcaggggataacgcaggaaagaacatgtgagcaaaaggccagcaaaaggccaggaac
cgtaaaaaggccgcgttgctggcgtttttccataggctccgcccccctgacgagcatcacaaaaatcg
acgctcaagtcagaggtggcgaaacccgacaggactataaagataccaggcgtttccccctggaagct
ccctcgtgcgctctcctgttccgaccctgccgcttaccggatacctgtccgcctttctcccttcggga
agcgtggcgctttctcatagctcacgctgtaggtatctcagttcggtgtaggtcgttcgctccaagct
gggctgtgtgcacgaaccccccgttcagcccgaccgctgcgccttatccggtaactatcgtcttgagt
ccaacccggtaagacacgacttatcgccactggcagcagccactggtaacaggattagcagagcgagg
tatgtaggcggtgctacagagttcttgaagtggtggcctaactacggctacactagaagaacagtatt
tggtatctgcgctctgctgaagccagttaccttcggaaaaagagttggtagctcttgatccggcaaac
aaaccaccgctggtagcggtggtttttttgtttgcaagcagcagattacgcgcagaaaaaaaggatct
caagaagatcctttgatcttttctacggggtctgacgctcagtggaacgaaaactcacgttaagggat
tttggtcatgagattatcaaaaaggatcttcacctagatccttttaaattaaaaatgaagttttaaat
caatctaaagtatatatgagtaaacttggtctgacagttaccaatgcttaatcagtgaggcacctatc
tcagcgatctgtctatttcgttcatccatagttgcctgactccccgtcgtgtagataactacgatacg
ggagggcttaccatctggccccagtgctgcaatgataccgcgagacccacgctcaccggctccagatt
tatcagcaataaaccagccagccggaagggccgagcgcagaagtggtcctgcaactttatccgcctcc
atccagtctattaattgttgccgggaagctagagtaagtagttcgccagttaatagtttgcgcaacgt
tgttgccattgctacaggcatcgtggtgtcacgctcgtcgtttggtatggcttcattcagctccggtt
cccaacgatcaaggcgagttacatgatcccccatgttgtgcaaaaaagcggttagctccttcggtcct
ccgatcgttgtcagaagtaagttggccgcagtgttatcactcatggttatggcagcactgcataattc
tcttactgtcatgccatccgtaagatgcttttctgtgactggtgagtactcaaccaagtcattctgag
aatagtgtatgcggcgaccgagttgctcttgcccggcgtcaatacgggataataccgcgccacatagc
agaactttaaaagtgctcatcattggaaaacgttcttcggggcgaaaactctcaaggatcttaccgct
gttgagatccagttcgatgtaacccactcgtgcacccaactgatcttcagcatcttttactttcacca
gcgtttctgggtgagcaaaaacaggaaggcaaaatgccgcaaaaaagggaataagggcgacacggaaa
tgttgaatactcatactcttcctttttcaatattattgaagcatttatcagggttattgtctcatgag
cggatacatatttgaatgtatttagaaaaataaacaaataggggttccgcgcacatttccccgaaaag
tgccacctgacgtc
pZV10_SARS-CoV-2-UTR-spike_delta_HexaPro_NTD_T313_SPY_catcher
SEQ ID NO: 92
gacggatcgggagatctcccgatcccctatggtgcactctcagtacaatctgctctgatgccgcatag
ttaagccagtatctgctccctgcttgtgtgttggaggtcgctgagtagtgcgcgagcaaaatttaagc
tacaacaaggcaaggcttgaccgacaattgcatgaagaatctgcttagggttaggcgttttgcgctgc
ttcgcgatgtacgggccagatatacgcgttgacattgattattgactagttattaatagtaatcaatt
acggggtcattagttcatagcccatatatggagttccgcgttacataacttacggtaaatggcccgcc
tggctgaccgcccaacgacccccgcccattgacgtcaataatgacgtatgttcccatagtaacgccaa
tagggactttccattgacgtcaatgggtggagtatttacggtaaactgcccacttggcagtacatcaa
gtgtatcatatgccaagtacgccccctattgacgtcaatgacggtaaatggcccgcctggcattatgc
ccagtacatgaccttatgggactttcctacttggcagtacatctacgtattagtcatcgctattacca
tggtgatgcggttttggcagtacatcaatgggcgtggatagcggtttgactcacggggatttccaagt
ctccaccccattgacgtcaatgggagtttgttttggcaccaaaatcaacgggactttccaaaatgtcg
taacaactccgccccattgacgcaaatgggcggtaggcgtgtacggtgggaggtctatataagcagag
ctctctggctaactagagaacccactgcttactggcttatcgaaattaatacgactcactatagggag
acccaagctggctagccaccgagaataaactagtattcttctggtccccacagactcagagagaaccc
gccaccatgtttgtgttcctggtgctgctgccactggtgtccagccagtgtgtgaacctgaggaccag
gacccaacttcctcctgcctacaccaactccttcaccaggggagtctactaccctgacaaggtgttca
ggtcctctgtgctgcacagcacccaggacctgttcctgccattcttcagcaatgtgacctggttccat
gccatccatgtgtctggcaccaatggcaccaagaggtttgacaaccctgtgctgccattcaatgatgg
agtctactttgccagcacagagaagagcaacatcatcaggggctggatttttggcaccaccctggaca
gcaagacccagtccctgctgattgtgaacaatgccaccaatgtggtgattaaggtgtgtgagttccag
ttctgtaatgacccattcctggacgtctactaccacaagaacaacaagtcctggatggagtctggcgt
ctactcctctgccaacaactgtacctttgaatatgtgagccaaccattcctgatggacttggagggca
agcagggcaacttcaagaacctgagggagtttgtgttcaagaacattgatggctacttcaagatttac
agcaaacacacaccaatcaacctggtgagggacctgccacagggcttctctgccttggaaccactggt
ggacctgccaattggcatcaacatcaccaggttccagaccctgctggctctgcacaggtcctacctga
cacctggagactcctcctctggctggacagcaggagcagcagcctactatgtgggctacctccaacca
aggaccttcctgctgaaatacaatgagaatggcaccatcacagatgctgtggactgtgccctggaccc
actgtctgagaccaagtgtaccctgaagtccttcacagtggagaagggcatctaccagaccggcagca
gcgtgaccacactgtccggactgtctggagagcagggaccatccggcgacatgaccacagaggaggat
tctgccacacacatcaagttcagcaagagggacgaggacggaagagagctggcaggagcaaccatgga
gctgagggatagctccggcaagaccatcagcacatggatctccgacggccacgtgaaggatttctacc
tgtatcccggcaagtacacctttgtggagacagccgcaccagacggatatgaggtggcaacccctatc
gagtttacagtgaacgaggacggacaggtgaccgtggatggagaggcaacagagggcgatgcacacac
ctgactcgagctggtactgcatgcacgcaatgctagctgcccctttcccgtcctgggtaccccgagtc
tcccccgacctcgggtcccaggtatgctcccacctccacctgccccactcaccacctctgctagttcc
agacacctcccaagcacgcagcaatgcagctcaaaacgcttagcctagccacacccccacgggaaaca
gcagtgattaacctttagcaataaacgaaagtttaactaagctatactaaccccagggttggtcaatt
tcgtgccagccacaccctggagctagcaaaccgctgatcagcctcgactgtgccttctagttgccagc
catctgttgtttgcccctcccccgtgccttccttgaccctggaaggtgccactcccactgtcctttcc
taataaaatgaggaaattgcatcgcattgtctgagtaggtgtcattctattctggggggtggggtggg
gcaggacagcaagggggaggattgggaagacaatagcaggcatgctggggatgcggtgggctctatgg
cttctgaggcggaaagaaccagctggggctctagggggtatccccacgcgccctgtagcggcgcatta
agcgcggcgggtgtggtggttacgcgcagcgtgaccgctacacttgccagcgccctagcgcccgctcc
tttcgctttcttcccttcctttctcgccacgttcgccggctttccccgtcaagctctaaatcgggggc
tccctttagggttccgatttagtgctttacggcacctcgaccccaaaaaacttgattagggtgatggt
tcacgtagtgggccatcgccctgatagacggtttttcgccctttgacgttggagtccacgttctttaa
tagtggactcttgttccaaactggaacaacactcaaccctatctcggtctattcttttgatttataag
ggattttgccgatttcggcctattggttaaaaaatgagctgatttaacaaaaatttaacgcgaattaa
ttctgtggaatgtgtgtcagttagggtgtggaaagtccccaggctccccagcaggcagaagtatgcaa
agcatgcatctcaattagtcagcaaccaggtgtggaaagtccccaggctccccagcaggcagaagtat
gcaaagcatgcatctcaattagtcagcaaccatagtcccgcccctaactccgcccatcccgcccctaa
ctccgcccagttccgcccattctccgccccatggctgactaattttttttatttatgcagaggccgag
gccgcctctgcctctgagctattccagaagtagtgaggaggcttttttggaggcctaggcttttgcaa
aaagctcccgggagcttgtatatccattttcggatctgatcaagagacaggatgaggatcgtttcgca
tgattgaacaagatggattgcacgcaggttctccggccgcttgggtggagaggctattcggctatgac
tgggcacaacagacaatcggctgctctgatgccgccgtgttccggctgtcagcgcaggggcgcccggt
tctttttgtcaagaccgacctgtccggtgccctgaatgaactgcaggacgaggcagcgcggctatcgt
ggctggccacgacgggcgttccttgcgcagctgtgctcgacgttgtcactgaagcgggaagggactgg
ctgctattgggcgaagtgccggggcaggatctcctgtcatctcaccttgctcctgccgagaaagtatc
catcatggctgatgcaatgcggcggctgcatacgcttgatccggctacctgcccattcgaccaccaag
cgaaacatcgcatcgagcgagcacgtactcggatggaagccggtcttgtcgatcaggatgatctggac
gaagagcatcaggggctcgcgccagccgaactgttcgccaggctcaaggcgcgcatgcccgacggcga
ggatctcgtcgtgacccatggcgatgcctgcttgccgaatatcatggtggaaaatggccgcttttctg
gattcatcgactgtggccggctgggtgtggcggaccgctatcaggacatagcgttggctacccgtgat
attgctgaagagcttggcggcgaatgggctgaccgcttcctcgtgctttacggtatcgccgctcccga
ttcgcagcgcatcgccttctatcgccttcttgacgagttcttctgagcgggactctggggttcgaaat
gaccgaccaagcgacgcccaacctgccatcacgagatttcgattccaccgccgccttctatgaaaggt
tgggcttcggaatcgttttccgggacgccggctggatgatcctccagcgcggggatctcatgctggag
ttcttcgcccaccccaacttgtttattgcagcttataatggttacaaataaagcaatagcatcacaaa
tttcacaaataaagcatttttttcactgcattctagttgtggtttgtccaaactcatcaatgtatctt
atcatgtctgtataccgtcgacctctagctagagcttggcgtaatcatggtcatagctgtttcctgtg
tgaaattgttatccgctcacaattccacacaacatacgagccggaagcataaagtgtaaagcctgggg
tgcctaatgagtgagctaactcacattaattgcgttgcgctcactgcccgctttccagtcgggaaacc
tgtcgtgccagctgcattaatgaatcggccaacgcgcggggagaggcggtttgcgtattgggcgctct
tccgcttcctcgctcactgactcgctgcgctcggtcgttcggctgcggcgagcggtatcagctcactc
aaaggcggtaatacggttatccacagaatcaggggataacgcaggaaagaacatgtgagcaaaaggcc
agcaaaaggccaggaaccgtaaaaaggccgcgttgctggcgtttttccataggctccgcccccctgac
gagcatcacaaaaatcgacgctcaagtcagaggtggcgaaacccgacaggactataaagataccaggc
gtttccccctggaagctccctcgtgcgctctcctgttccgaccctgccgcttaccggatacctgtccg
cctttctcccttcgggaagcgtggcgctttctcatagctcacgctgtaggtatctcagttcggtgtag
gtcgttcgctccaagctgggctgtgtgcacgaaccccccgttcagcccgaccgctgcgccttatccgg
taactatcgtcttgagtccaacccggtaagacacgacttatcgccactggcagcagccactggtaaca
ggattagcagagcgaggtatgtaggcggtgctacagagttcttgaagtggtggcctaactacggctac
actagaagaacagtatttggtatctgcgctctgctgaagccagttaccttcggaaaaagagttggtag
ctcttgatccggcaaacaaaccaccgctggtagcggtggtttttttgtttgcaagcagcagattacgc
gcagaaaaaaaggatctcaagaagatcctttgatcttttctacggggtctgacgctcagtggaacgaa
aactcacgttaagggattttggtcatgagattatcaaaaaggatcttcacctagatccttttaaatta
aaaatgaagttttaaatcaatctaaagtatatatgagtaaacttggtctgacagttaccaatgcttaa
tcagtgaggcacctatctcagcgatctgtctatttcgttcatccatagttgcctgactccccgtcgtg
tagataactacgatacgggagggcttaccatctggccccagtgctgcaatgataccgcgagacccacg
ctcaccggctccagatttatcagcaataaaccagccagccggaagggccgagcgcagaagtggtcctg
caactttatccgcctccatccagtctattaattgttgccgggaagctagagtaagtagttcgccagtt
aatagtttgcgcaacgttgttgccattgctacaggcatcgtggtgtcacgctcgtcgtttggtatggc
ttcattcagctccggttcccaacgatcaaggcgagttacatgatcccccatgttgtgcaaaaaagcgg
ttagctccttcggtcctccgatcgttgtcagaagtaagttggccgcagtgttatcactcatggttatg
gcagcactgcataattctcttactgtcatgccatccgtaagatgcttttctgtgactggtgagtactc
aaccaagtcattctgagaatagtgtatgcggcgaccgagttgctcttgcccggcgtcaatacgggata
ataccgcgccacatagcagaactttaaaagtgctcatcattggaaaacgttcttcggggcgaaaactc
tcaaggatcttaccgctgttgagatccagttcgatgtaacccactcgtgcacccaactgatcttcagc
atcttttactttcaccagcgtttctgggtgagcaaaaacaggaaggcaaaatgccgcaaaaaagggaa
taagggcgacacggaaatgttgaatactcatactcttcctttttcaatattattgaagcatttatcag
ggttattgtctcatgagcggatacatatttgaatgtatttagaaaaataaacaaataggggttccgcg
cacatttccccgaaaagtgccacctgacgtc
pZV11_SARS-CoV-2-UTR-spike_delta_HexaPro_SPY_tag_S314_RBD_S683
SEQ ID NO: 93
gacggatcgggagatctcccgatcccctatggtgcactctcagtacaatctgctctgatgccgcatag
ttaagccagtatctgctccctgcttgtgtgttggaggtcgctgagtagtgcgcgagcaaaatttaagc
tacaacaaggcaaggcttgaccgacaattgcatgaagaatctgcttagggttaggcgttttgcgctgc
ttcgcgatgtacgggccagatatacgcgttgacattgattattgactagttattaatagtaatcaatt
acggggtcattagttcatagcccatatatggagttccgcgttacataacttacggtaaatggcccgcc
tggctgaccgcccaacgacccccgcccattgacgtcaataatgacgtatgttcccatagtaacgccaa
tagggactttccattgacgtcaatgggtggagtatttacggtaaactgcccacttggcagtacatcaa
gtgtatcatatgccaagtacgccccctattgacgtcaatgacggtaaatggcccgcctggcattatgc
ccagtacatgaccttatgggactttcctacttggcagtacatctacgtattagtcatcgctattacca
tggtgatgcggttttggcagtacatcaatgggcgtggatagcggtttgactcacggggatttccaagt
ctccaccccattgacgtcaatgggagtttgttttggcaccaaaatcaacgggactttccaaaatgtcg
taacaactccgccccattgacgcaaatgggcggtaggcgtgtacggtgggaggtctatataagcagag
ctctctggctaactagagaacccactgcttactggcttatcgaaattaatacgactcactatagggag
acccaagctggctagccaccgagaataaactagtattcttctggtccccacagactcagagagaaccc
gccaccatgtttgtgttcctggtgctgctgccactggtgtccagccgtggcgtgcctcatatcgtgat
ggtggacgcctacaagcgttacaagagcaacttcagggtccaaccaacagagagcattgtgaggtttc
caaacatcaccaacctgtgtccatttggagaggtgttcaatgccaccaggtttgcctctgtctatgcc
tggaacaggaagaggattagcaactgtgtggctgactactctgtgctctacaactctgcctccttcag
caccttcaagtgttatggagtgagcccaaccaaactgaatgacctgtgtttcaccaatgtctatgctg
actcctttgtgattaggggagatgaggtgagacagattgcccctggacaaacaggcaagattgctgac
tacaactacaaactgcctgatgacttcacaggctgtgtgattgcctggaacagcaacaacctggacag
caaggtgggaggcaactacaactacaggtacagactgttcaggaagagcaacctgaaaccatttgaga
gggacatcagcacagagatttaccaggctggcagcaagccatgtaatggagtggagggcttcaactgt
tactttccactccaatcctatggcttccaaccaaccaatggagtgggctaccaaccatacagggtggt
ggtgctgtcctttgaactgctccatgcccctgccacagtgtgtggaccaaagaagagcaccaacctgg
tgaagaacaagtgtgtgaacttcaacttcaatggactgacaggcacaggagtgctgacagagagcaac
aagaagttcctgccattccaacagtttggcagggacattgctgacaccacagatgctgtgagggaccc
acagaccttggagattctggacatcacaccatgttcctttggaggagtgtctgtgattacacctggca
ccaacaccagcaaccaggtggctgtgctctaccagggcgtgaactgtactgaggtgcctgtggctatc
catgctgaccaacttacaccaacctggagggtctacagcacaggaagcaacgtgttccagaccagggc
tggctgtctgattggagcagagcatgtgaacaactcctatgagtgtgacatcccaattggagcaggca
tctgtgcctcctaccagacccagaccaacagcaggggctctgcatcttgactcgagctggtactgcat
gcacgcaatgctagctgcccctttcccgtcctgggtaccccgagtctcccccgacctcgggtcccagg
tatgctcccacctccacctgccccactcaccacctctgctagttccagacacctcccaagcacgcagc
aatgcagctcaaaacgcttagcctagccacacccccacgggaaacagcagtgattaacctttagcaat
aaacgaaagtttaactaagctatactaaccccagggttggtcaatttcgtgccagccacaccctggag
ctagcaaaccgctgatcagcctcgactgtgccttctagttgccagccatctgttgtttgcccctcccc
cgtgccttccttgaccctggaaggtgccactcccactgtcctttcctaataaaatgaggaaattgcat
cgcattgtctgagtaggtgtcattctattctggggggtggggtggggcaggacagcaagggggaggat
tgggaagacaatagcaggcatgctggggatgcggtgggctctatggcttctgaggcggaaagaaccag
ctggggctctagggggtatccccacgcgccctgtagcggcgcattaagcgcggcgggtgtggtggtta
cgcgcagcgtgaccgctacacttgccagcgccctagcgcccgctcctttcgctttcttcccttccttt
ctcgccacgttcgccggctttccccgtcaagctctaaatcgggggctccctttagggttccgatttag
tgctttacggcacctcgaccccaaaaaacttgattagggtgatggttcacgtagtgggccatcgccct
gatagacggtttttcgccctttgacgttggagtccacgttctttaatagtggactcttgttccaaact
ggaacaacactcaaccctatctcggtctattcttttgatttataagggattttgccgatttcggccta
ttggttaaaaaatgagctgatttaacaaaaatttaacgcgaattaattctgtggaatgtgtgtcagtt
agggtgtggaaagtccccaggctccccagcaggcagaagtatgcaaagcatgcatctcaattagtcag
caaccaggtgtggaaagtccccaggctccccagcaggcagaagtatgcaaagcatgcatctcaattag
tcagcaaccatagtcccgcccctaactccgcccatcccgcccctaactccgcccagttccgcccattc
tccgccccatggctgactaattttttttatttatgcagaggccgaggccgcctctgcctctgagctat
tccagaagtagtgaggaggcttttttggaggcctaggcttttgcaaaaagctcccgggagcttgtata
tccattttcggatctgatcaagagacaggatgaggatcgtttcgcatgattgaacaagatggattgca
cgcaggttctccggccgcttgggtggagaggctattcggctatgactgggcacaacagacaatcggct
gctctgatgccgccgtgttccggctgtcagcgcaggggcgcccggttctttttgtcaagaccgacctg
tccggtgccctgaatgaactgcaggacgaggcagcgcggctatcgtggctggccacgacgggcgttcc
ttgcgcagctgtgctcgacgttgtcactgaagcgggaagggactggctgctattgggcgaagtgccgg
ggcaggatctcctgtcatctcaccttgctcctgccgagaaagtatccatcatggctgatgcaatgcgg
cggctgcatacgcttgatccggctacctgcccattcgaccaccaagcgaaacatcgcatcgagcgagc
acgtactcggatggaagccggtcttgtcgatcaggatgatctggacgaagagcatcaggggctcgcgc
cagccgaactgttcgccaggctcaaggcgcgcatgcccgacggcgaggatctcgtcgtgacccatggc
gatgcctgcttgccgaatatcatggtggaaaatggccgcttttctggattcatcgactgtggccggct
gggtgtggcggaccgctatcaggacatagcgttggctacccgtgatattgctgaagagcttggcggcg
aatgggctgaccgcttcctcgtgctttacggtatcgccgctcccgattcgcagcgcatcgccttctat
cgccttcttgacgagttcttctgagcgggactctggggttcgaaatgaccgaccaagcgacgcccaac
ctgccatcacgagatttcgattccaccgccgccttctatgaaaggttgggcttcggaatcgttttccg
ggacgccggctggatgatcctccagcgcggggatctcatgctggagttcttcgcccaccccaacttgt
ttattgcagcttataatggttacaaataaagcaatagcatcacaaatttcacaaataaagcatttttt
tcactgcattctagttgtggtttgtccaaactcatcaatgtatcttatcatgtctgtataccgtcgac
ctctagctagagcttggcgtaatcatggtcatagctgtttcctgtgtgaaattgttatccgctcacaa
ttccacacaacatacgagccggaagcataaagtgtaaagcctggggtgcctaatgagtgagctaactc
acattaattgcgttgcgctcactgcccgctttccagtcgggaaacctgtcgtgccagctgcattaatg
aatcggccaacgcgcggggagaggcggtttgcgtattgggcgctcttccgcttcctcgctcactgact
cgctgcgctcggtcgttcggctgcggcgagcggtatcagctcactcaaaggcggtaatacggttatcc
acagaatcaggggataacgcaggaaagaacatgtgagcaaaaggccagcaaaaggccaggaaccgtaa
aaaggccgcgttgctggcgtttttccataggctccgcccccctgacgagcatcacaaaaatcgacgct
caagtcagaggtggcgaaacccgacaggactataaagataccaggcgtttccccctggaagctccctc
gtgcgctctcctgttccgaccctgccgcttaccggatacctgtccgcctttctcccttcgggaagcgt
ggcgctttctcatagctcacgctgtaggtatctcagttcggtgtaggtcgttcgctccaagctgggct
gtgtgcacgaaccccccgttcagcccgaccgctgcgccttatccggtaactatcgtcttgagtccaac
ccggtaagacacgacttatcgccactggcagcagccactggtaacaggattagcagagcgaggtatgt
aggcggtgctacagagttcttgaagtggtggcctaactacggctacactagaagaacagtatttggta
tctgcgctctgctgaagccagttaccttcggaaaaagagttggtagctcttgatccggcaaacaaacc
accgctggtagcggtggtttttttgtttgcaagcagcagattacgcgcagaaaaaaaggatctcaaga
agatcctttgatcttttctacggggtctgacgctcagtggaacgaaaactcacgttaagggattttgg
tcatgagattatcaaaaaggatcttcacctagatccttttaaattaaaaatgaagttttaaatcaatc
taaagtatatatgagtaaacttggtctgacagttaccaatgcttaatcagtgaggcacctatctcagc
gatctgtctatttcgttcatccatagttgcctgactccccgtcgtgtagataactacgatacgggagg
gcttaccatctggccccagtgctgcaatgataccgcgagacccacgctcaccggctccagatttatca
gcaataaaccagccagccggaagggccgagcgcagaagtggtcctgcaactttatccgcctccatcca
gtctattaattgttgccgggaagctagagtaagtagttcgccagttaatagtttgcgcaacgttgttg
ccattgctacaggcatcgtggtgtcacgctcgtcgtttggtatggcttcattcagctccggttcccaa
cgatcaaggcgagttacatgatcccccatgttgtgcaaaaaagcggttagctccttcggtcctccgat
cgttgtcagaagtaagttggccgcagtgttatcactcatggttatggcagcactgcataattctctta
ctgtcatgccatccgtaagatgcttttctgtgactggtgagtactcaaccaagtcattctgagaatag
tgtatgcggcgaccgagttgctcttgcccggcgtcaatacgggataataccgcgccacatagcagaac
tttaaaagtgctcatcattggaaaacgttcttcggggcgaaaactctcaaggatcttaccgctgttga
gatccagttcgatgtaacccactcgtgcacccaactgatcttcagcatcttttactttcaccagcgtt
tctgggtgagcaaaaacaggaaggcaaaatgccgcaaaaaagggaataagggcgacacggaaatgttg
aatactcatactcttcctttttcaatattattgaagcatttatcagggttattgtctcatgagcggat
acatatttgaatgtatttagaaaaataaacaaataggggttccgcgcacatttccccgaaaagtgcca
cctgacgtc
pZV12_SARS-CoV-2-UTR-spike_delta_HexaPro_SPY_tag_S314_RBD_S683_
T2A_SARS_RBD_T2A_MERS_RBD
SEQ ID NO: 94
gacggatcgggagatctcccgatcccctatggtgcactctcagtacaatctgctctgatgccgcatag
ttaagccagtatctgctccctgcttgtgtgttggaggtcgctgagtagtgcgcgagcaaaatttaagc
tacaacaaggcaaggcttgaccgacaattgcatgaagaatctgcttagggttaggcgttttgcgctgc
ttcgcgatgtacgggccagatatacgcgttgacattgattattgactagttattaatagtaatcaatt
acggggtcattagttcatagcccatatatggagttccgcgttacataacttacggtaaatggcccgcc
tggctgaccgcccaacgacccccgcccattgacgtcaataatgacgtatgttcccatagtaacgccaa
tagggactttccattgacgtcaatgggtggagtatttacggtaaactgcccacttggcagtacatcaa
gtgtatcatatgccaagtacgccccctattgacgtcaatgacggtaaatggcccgcctggcattatgc
ccagtacatgaccttatgggactttcctacttggcagtacatctacgtattagtcatcgctattacca
tggtgatgcggttttggcagtacatcaatgggcgtggatagcggtttgactcacggggatttccaagt
ctccaccccattgacgtcaatgggagtttgttttggcaccaaaatcaacgggactttccaaaatgtcg
taacaactccgccccattgacgcaaatgggcggtaggcgtgtacggtgggaggtctatataagcagag
ctctctggctaactagagaacccactgcttactggcttatcgaaattaatacgactcactatagggag
acccaagctggctagccaccgagaataaactagtattcttctggtccccacagactcagagagaaccc
gccaccatgtttgtgttcctggtgctgctgccactggtgtccagccgtggcgtgcctcatatcgtgat
ggtggacgcctacaagcgttacaagagcaacttcagggtccaaccaacagagagcattgtgaggtttc
caaacatcaccaacctgtgtccatttggagaggtgttcaatgccaccaggtttgcctctgtctatgcc
tggaacaggaagaggattagcaactgtgtggctgactactctgtgctctacaactctgcctccttcag
caccttcaagtgttatggagtgagcccaaccaaactgaatgacctgtgtttcaccaatgtctatgctg
actcctttgtgattaggggagatgaggtgagacagattgcccctggacaaacaggcaagattgctgac
tacaactacaaactgcctgatgacttcacaggctgtgtgattgcctggaacagcaacaacctggacag
caaggtgggaggcaactacaactacaggtacagactgttcaggaagagcaacctgaaaccatttgaga
gggacatcagcacagagatttaccaggctggcagcaagccatgtaatggagtggagggcttcaactgt
tactttccactccaatcctatggcttccaaccaaccaatggagtgggctaccaaccatacagggtggt
ggtgctgtcctttgaactgctccatgcccctgccacagtgtgtggaccaaagaagagcaccaacctgg
tgaagaacaagtgtgtgaacttcaacttcaatggactgacaggcacaggagtgctgacagagagcaac
aagaagttcctgccattccaacagtttggcagggacattgctgacaccacagatgctgtgagggaccc
acagaccttggagattctggacatcacaccatgttcctttggaggagtgtctgtgattacacctggca
ccaacaccagcaaccaggtggctgtgctctaccagggcgtgaactgtactgaggtgcctgtggctatc
catgctgaccaacttacaccaacctggagggtctacagcacaggaagcaacgtgttccagaccagggc
tggctgtctgattggagcagagcatgtgaacaactcctatgagtgtgacatcccaattggagcaggca
tctgtgcctcctaccagacccagaccaacagcaggggctctgcatctggctccggcgagggcagaggc
agtctgctgacatgcggtgacgtggaagagaatcccggccctatgtttgtgttcctggtgctgctgcc
actggtgtccagccgtggcgtgcctcatatcgtgatggtggacgcctacaagcgttacaagagcaact
tcagggtggtgccatctggagatgtggtgaggtttccaaacatcaccaacctgtgtccatttggagag
gtgttcaatgccaccaagtttccatctgtctatgcctgggagaggaagaagattagcaactgtgtggc
tgactactctgtgctctacaacagcaccttcttcagcaccttcaagtgttatggagtgtctgccacca
aactgaatgacctgtgtttcagcaatgtctatgctgactcctttgtggtgaagggagatgatgtgaga
cagattgcccctggacaaacaggagtgattgctgactacaactacaaactgcctgatgactttatggg
ctgtgtgctggcttggaacaccaggaacattgatgccaccagcacaggcaactacaactacaaataca
gatacctgagacatggcaaactgagaccatttgagagggacatcagcaatgtgccattcagccctgat
ggcaagccatgtactcctcctgccctgaactgttactggccactgaatgactatggcttctacaccac
cacaggcattggctaccaaccatacagggtggtggtgctgtcctttgaactgctgaatgcccctgcca
cagtgtgtggaccaaaaaagagcaccaacctggtgaagaacaagtgtgtgaacttcaacttcaatgga
ctgacaggcacaggagtgctgacagagagcaacaagaagttcctgccattccaacagtttggcaggga
cattgctgacaccacagatgctgtgagggacccacagaccttggagattctggacatcacaccatgtt
cctttggaggagtgtctgtgattacacctggcaccaacaccagcaaccaggtggctgtgctctaccag
ggcgtgaactgtactgaggtgcctgtggctatccatgctgaccaacttacaccaacctggagggtcta
cagcacaggaagcaacgtgttccagaccagggctggctgtctgattggagcagagcatgtgaacaact
cctatgagtgtgacatcccaattggagcaggcatctgtgcctcctaccagacccagaccaacagcagg
ggctctgcatctggctccggcgagggcagaggcagtctgctgacatgcggtgacgtggaagagaatcc
cggccctatgtttgtgttcctggtgctgctgccactggtgtccagccgtggcgtgcctcatatcgtga
tggtggacgcctacaagcgttacaagagcaacttcgaggctaagccatctggctctgtggtggaacag
gctgagggagtggagtgtgacttcagcccactgctgtctggcacacctccacaggtctacaacttcaa
gagactggtgttcaccaactgtaactacaacctgaccaaactgctgtccctgttctctgtgaatgact
tcacttgtagccagattagccctgctgccattgccagcaactgttactcctccctgattctggactac
ttctcctacccactgagtatgaagtctgacctgtctgtgtcctctgctggaccaatcagccagttcaa
ctacaagcagtccttcagcaacccaacttgtctgattctggctacagtgccacacaacctgaccacca
tcaccaagccactgaaatactcctacatcaacaagtgtagcagactgctgtctgatgacaggacagag
gtgccacaactagtgaatgccaaccaatacagcccatgtgtgagcattgtgccaagcacagtgtggga
ggatggagactactacaggaagcaacttagcccattggagggaggaggctggctggtggcatctggca
gcacagtggctatgacagaacaactccaaatgggctttggcatcacagtccaatatggcacagacacc
aactctgtgtgtccaaaattgaagagcaccaacctggtgaagaacaagtgtgtgaacttcaacttcaa
tggactgacaggcacaggagtgctgacagagagcaacaagaagttcctgccattccaacagtttggca
gggacattgctgacaccacagatgctgtgagggacccacagaccttggagattctggacatcacacca
tgttcctttggaggagtgtctgtgattacacctggcaccaacaccagcaaccaggtggctgtgctcta
ccagggcgtgaactgtactgaggtgcctgtggctatccatgctgaccaacttacaccaacctggaggg
tctacagcacaggaagcaacgtgttccagaccagggctggctgtctgattggagcagagcatgtgaac
aactcctatgagtgtgacatcccaattggagcaggcatctgtgcctcctaccagacccagaccaacag
caggggctctgcatcttgactcgagctggtactgcatgcacgcaatgctagctgcccctttcccgtcc
tgggtaccccgagtctcccccgacctcgggtcccaggtatgctcccacctccacctgccccactcacc
acctctgctagttccagacacctcccaagcacgcagcaatgcagctcaaaacgcttagcctagccaca
cccccacgggaaacagcagtgattaacctttagcaataaacgaaagtttaactaagctatactaaccc
cagggttggtcaatttcgtgccagccacaccctggagctagcaaaccgctgatcagcctcgactgtgc
cttctagttgccagccatctgttgtttgcccctcccccgtgccttccttgaccctggaaggtgccact
cccactgtcctttcctaataaaatgaggaaattgcatcgcattgtctgagtaggtgtcattctattct
ggggggtggggtggggcaggacagcaagggggaggattgggaagacaatagcaggcatgctggggatg
cggtgggctctatggcttctgaggcggaaagaaccagctggggctctagggggtatccccacgcgccc
tgtagcggcgcattaagcgcggcgggtgtggtggttacgcgcagcgtgaccgctacacttgccagcgc
cctagcgcccgctcctttcgctttcttcccttcctttctcgccacgttcgccggctttccccgtcaag
ctctaaatcgggggctccctttagggttccgatttagtgctttacggcacctcgaccccaaaaaactt
gattagggtgatggttcacgtagtgggccatcgccctgatagacggtttttcgccctttgacgttgga
gtccacgttctttaatagtggactcttgttccaaactggaacaacactcaaccctatctcggtctatt
cttttgatttataagggattttgccgatttcggcctattggttaaaaaatgagctgatttaacaaaaa
tttaacgcgaattaattctgtggaatgtgtgtcagttagggtgtggaaagtccccaggctccccagca
ggcagaagtatgcaaagcatgcatctcaattagtcagcaaccaggtgtggaaagtccccaggctcccc
agcaggcagaagtatgcaaagcatgcatctcaattagtcagcaaccatagtcccgcccctaactccgc
ccatcccgcccctaactccgcccagttccgcccattctccgccccatggctgactaattttttttatt
tatgcagaggccgaggccgcctctgcctctgagctattccagaagtagtgaggaggcttttttggagg
cctaggcttttgcaaaaagctcccgggagcttgtatatccattttcggatctgatcaagagacaggat
gaggatcgtttcgcatgattgaacaagatggattgcacgcaggttctccggccgcttgggtggagagg
ctattcggctatgactgggcacaacagacaatcggctgctctgatgccgccgtgttccggctgtcagc
gcaggggcgcccggttctttttgtcaagaccgacctgtccggtgccctgaatgaactgcaggacgagg
cagcgcggctatcgtggctggccacgacgggcgttccttgcgcagctgtgctcgacgttgtcactgaa
gcgggaagggactggctgctattgggcgaagtgccggggcaggatctcctgtcatctcaccttgctcc
tgccgagaaagtatccatcatggctgatgcaatgcggcggctgcatacgcttgatccggctacctgcc
cattcgaccaccaagcgaaacatcgcatcgagcgagcacgtactcggatggaagccggtcttgtcgat
caggatgatctggacgaagagcatcaggggctcgcgccagccgaactgttcgccaggctcaaggcgcg
catgcccgacggcgaggatctcgtcgtgacccatggcgatgcctgcttgccgaatatcatggtggaaa
atggccgcttttctggattcatcgactgtggccggctgggtgtggcggaccgctatcaggacatagcg
ttggctacccgtgatattgctgaagagcttggcggcgaatgggctgaccgcttcctcgtgctttacgg
tatcgccgctcccgattcgcagcgcatcgccttctatcgccttcttgacgagttcttctgagcgggac
tctggggttcgaaatgaccgaccaagcgacgcccaacctgccatcacgagatttcgattccaccgccg
ccttctatgaaaggttgggcttcggaatcgttttccgggacgccggctggatgatcctccagcgcggg
gatctcatgctggagttcttcgcccaccccaacttgtttattgcagcttataatggttacaaataaag
caatagcatcacaaatttcacaaataaagcatttttttcactgcattctagttgtggtttgtccaaac
tcatcaatgtatcttatcatgtctgtataccgtcgacctctagctagagcttggcgtaatcatggtca
tagctgtttcctgtgtgaaattgttatccgctcacaattccacacaacatacgagccggaagcataaa
gtgtaaagcctggggtgcctaatgagtgagctaactcacattaattgcgttgcgctcactgcccgctt
tccagtcgggaaacctgtcgtgccagctgcattaatgaatcggccaacgcgcggggagaggcggtttg
cgtattgggcgctcttccgcttcctcgctcactgactcgctgcgctcggtcgttcggctgcggcgagc
ggtatcagctcactcaaaggcggtaatacggttatccacagaatcaggggataacgcaggaaagaaca
tgtgagcaaaaggccagcaaaaggccaggaaccgtaaaaaggccgcgttgctggcgtttttccatagg
ctccgcccccctgacgagcatcacaaaaatcgacgctcaagtcagaggtggcgaaacccgacaggact
ataaagataccaggcgtttccccctggaagctccctcgtgcgctctcctgttccgaccctgccgctta
ccggatacctgtccgcctttctcccttcgggaagcgtggcgctttctcatagctcacgctgtaggtat
ctcagttcggtgtaggtcgttcgctccaagctgggctgtgtgcacgaaccccccgttcagcccgaccg
ctgcgccttatccggtaactatcgtcttgagtccaacccggtaagacacgacttatcgccactggcag
cagccactggtaacaggattagcagagcgaggtatgtaggcggtgctacagagttcttgaagtggtgg
cctaactacggctacactagaagaacagtatttggtatctgcgctctgctgaagccagttaccttcgg
aaaaagagttggtagctcttgatccggcaaacaaaccaccgctggtagcggtggtttttttgtttgca
agcagcagattacgcgcagaaaaaaaggatctcaagaagatcctttgatcttttctacggggtctgac
gctcagtggaacgaaaactcacgttaagggattttggtcatgagattatcaaaaaggatcttcaccta
gatccttttaaattaaaaatgaagttttaaatcaatctaaagtatatatgagtaaacttggtctgaca
gttaccaatgcttaatcagtgaggcacctatctcagcgatctgtctatttcgttcatccatagttgcc
tgactccccgtcgtgtagataactacgatacgggagggcttaccatctggccccagtgctgcaatgat
accgcgagacccacgctcaccggctccagatttatcagcaataaaccagccagccggaagggccgagc
gcagaagtggtcctgcaactttatccgcctccatccagtctattaattgttgccgggaagctagagta
agtagttcgccagttaatagtttgcgcaacgttgttgccattgctacaggcatcgtggtgtcacgctc
gtcgtttggtatggcttcattcagctccggttcccaacgatcaaggcgagttacatgatcccccatgt
tgtgcaaaaaagcggttagctccttcggtcctccgatcgttgtcagaagtaagttggccgcagtgtta
tcactcatggttatggcagcactgcataattctcttactgtcatgccatccgtaagatgcttttctgt
gactggtgagtactcaaccaagtcattctgagaatagtgtatgcggcgaccgagttgctcttgcccgg
cgtcaatacgggataataccgcgccacatagcagaactttaaaagtgctcatcattggaaaacgttct
tcggggcgaaaactctcaaggatcttaccgctgttgagatccagttcgatgtaacccactcgtgcacc
caactgatcttcagcatcttttactttcaccagcgtttctgggtgagcaaaaacaggaaggcaaaatg
ccgcaaaaaagggaataagggcgacacggaaatgttgaatactcatactcttcctttttcaatattat
tgaagcatttatcagggttattgtctcatgagcggatacatatttgaatgtatttagaaaaataaaca
aataggggttccgcgcacatttccccgaaaagtgccacctgacgtc
pMD119_pcDNA3.1_ecto-SARS-CoV-2_spike_VG40589-UT
SEQ ID NO: 95
gacggatcgggagatctcccgatcccctatggtgcactctcagtacaatctgctctgatgccgcatag
ttaagccagtatctgctccctgcttgtgtgttggaggtcgctgagtagtgcgcgagcaaaatttaagc
tacaacaaggcaaggcttgaccgacaattgcatgaagaatctgcttagggttaggcgttttgcgctgc
ttcgcgatgtacgggccagatatacgcgttgacattgattattgactagttattaatagtaatcaatt
acggggtcattagttcatagcccatatatggagttccgcgttacataacttacggtaaatggcccgcc
tggctgaccgcccaacgacccccgcccattgacgtcaataatgacgtatgttcccatagtaacgccaa
tagggactttccattgacgtcaatgggtggagtatttacggtaaactgcccacttggcagtacatcaa
gtgtatcatatgccaagtacgccccctattgacgtcaatgacggtaaatggcccgcctggcattatgc
ccagtacatgaccttatgggactttcctacttggcagtacatctacgtattagtcatcgctattacca
tggtgatgcggttttggcagtacatcaatgggcgtggatagcggtttgactcacggggatttccaagt
ctccaccccattgacgtcaatgggagtttgttttggcaccaaaatcaacgggactttccaaaatgtcg
taacaactccgccccattgacgcaaatgggcggtaggcgtgtacggtgggaggtctatataagcagag
ctctctggctaactagagaacccactgcttactggcttatcgaaattaatacgactcactatagggag
acccaagctggATGTTTGTGTTCCTGGTGCTGCTGCCACTGGTGTCCAGCCAGTGTGTGAACCTGACC
ACCAGGACCCAACTTCCTCCTGCCTACACCAACTCCTTCACCAGGGGAGTCTACTACCCTGACAAGGT
GTTCAGGTCCTCTGTGCTGCACAGCACCCAGGACCTGTTCCTGCCATTCTTCAGCAATGTGACCTGGT
TCCATGCCATCCATGTGTCTGGCACCAATGGCACCAAGAGGTTTGACAACCCTGTGCTGCCATTCAAT
GATGGAGTCTACTTTGCCAGCACAGAGAAGAGCAACATCATCAGGGGCTGGATTTTTGGCACCACCCT
GGACAGCAAGACCCAGTCCCTGCTGATTGTGAACAATGCCACCAATGTGGTGATTAAGGTGTGTGAGT
TCCAGTTCTGTAATGACCCATTCCTGGGAGTCTACTACCACAAGAACAACAAGTCCTGGATGGAGTCT
GAGTTCAGGGTCTACTCCTCTGCCAACAACTGTACCTTTGAATATGTGAGCCAACCATTCCTGATGGA
CTTGGAGGGCAAGCAGGGCAACTTCAAGAACCTGAGGGAGTTTGTGTTCAAGAACATTGATGGCTACT
TCAAGATTTACAGCAAACACACACCAATCAACCTGGTGAGGGACCTGCCACAGGGCTTCTCTGCCTTG
GAACCACTGGTGGACCTGCCAATTGGCATCAACATCACCAGGTTCCAGACCCTGCTGGCTCTGCACAG
GTCCTACCTGACACCTGGAGACTCCTCCTCTGGCTGGACAGCAGGAGCAGCAGCCTACTATGTGGGCT
ACCTCCAACCAAGGACCTTCCTGCTGAAATACAATGAGAATGGCACCATCACAGATGCTGTGGACTGT
GCCCTGGACCCACTGTCTGAGACCAAGTGTACCCTGAAATCCTTCACAGTGGAGAAGGGCATCTACCA
GACCAGCAACTTCAGGGTCCAACCAACAGAGAGCATTGTGAGGTTTCCAAACATCACCAACCTGTGTC
CATTTGGAGAGGTGTTCAATGCCACCAGGTTTGCCTCTGTCTATGCCTGGAACAGGAAGAGGATTAGC
AACTGTGTGGCTGACTACTCTGTGCTCTACAACTCTGCCTCCTTCAGCACCTTCAAGTGTTATGGAGT
GAGCCCAACCAAACTGAATGACCTGTGTTTCACCAATGTCTATGCTGACTCCTTTGTGATTAGGGGAG
ATGAGGTGAGACAGATTGCCCCTGGACAAACAGGCAAGATTGCTGACTACAACTACAAACTGCCTGAT
GACTTCACAGGCTGTGTGATTGCCTGGAACAGCAACAACCTGGACAGCAAGGTGGGAGGCAACTACAA
CTACCTCTACAGACTGTTCAGGAAGAGCAACCTGAAACCATTTGAGAGGGACATCAGCACAGAGATTT
ACCAGGCTGGCAGCACACCATGTAATGGAGTGGAGGGCTTCAACTGTTACTTTCCACTCCAATCCTAT
GGCTTCCAACCAACCAATGGAGTGGGCTACCAACCATACAGGGTGGTGGTGCTGTCCTTTGAACTGCT
CCATGCCCCTGCCACAGTGTGTGGACCAAAGAAGAGCACCAACCTGGTGAAGAACAAGTGTGTGAACT
TCAACTTCAATGGACTGACAGGCACAGGAGTGCTGACAGAGAGCAACAAGAAGTTCCTGCCATTCCAA
CAGTTTGGCAGGGACATTGCTGACACCACAGATGCTGTGAGGGACCCACAGACCTTGGAGATTCTGGA
CATCACACCATGTTCCTTTGGAGGAGTGTCTGTGATTACACCTGGCACCAACACCAGCAACCAGGTGG
CTGTGCTCTACCAGGATGTGAACTGTACTGAGGTGCCTGTGGCTATCCATGCTGACCAACTTACACCA
ACCTGGAGGGTCTACAGCACAGGCAGCAATGTGTTCCAGACCAGGGCTGGCTGTCTGATTGGAGCAGA
GCATGTGAACAACTCCTATGAGTGTGACATCCCAATTGGAGCAGGCATCTGTGCCTCCTACCAGACCC
AGACCAACAGCCCAAGGAGGGCAAGGTCTGTGGCAAGCCAGAGCATCATTGCCTACACAATGAGTCTG
GGAGCAGAGAACTCTGTGGCTTACAGCAACAACAGCATTGCCATCCCAACCAACTTCACCATCTCTGT
GACCACAGAGATTCTGCCTGTGAGTATGACCAAGACCTCTGTGGACTGTACAATGTATATCTGTGGAG
ACAGCACAGAGTGTAGCAACCTGCTGCTCCAATATGGCTCCTTCTGTACCCAACTTAACAGGGCTCTG
ACAGGCATTGCTGTGGAACAGGACAAGAACACCCAGGAGGTGTTTGCCCAGGTGAAGCAGATTTACAA
GACACCTCCAATCAAGGACTTTGGAGGCTTCAACTTCAGCCAGATTCTGCCTGACCCAAGCAAGCCAA
GCAAGAGGTCCTTCATTGAGGACCTGCTGTTCAACAAGGTGACCCTGGCTGATGCTGGCTTCATCAAG
CAATATGGAGACTGTCTGGGAGACATTGCTGCCAGGGACCTGATTTGTGCCCAGAAGTTCAATGGACT
GACAGTGCTGCCTCCACTGCTGACAGATGAGATGATTGCCCAATACACCTCTGCCCTGCTGGCTGGCA
CCATCACCTCTGGCTGGACCTTTGGAGCAGGAGCAGCCCTCCAAATCCCATTTGCTATGCAGATGGCT
TACAGGTTCAATGGCATTGGAGTGACCCAGAATGTGCTCTATGAGAACCAGAAACTGATTGCCAACCA
GTTCAACTCTGCCATTGGCAAGATTCAGGACTCCCTGTCCAGCACAGCCTCTGCCCTGGGCAAACTCC
AAGATGTGGTGAACCAGAATGCCCAGGCTCTGAACACCCTGGTGAAGCAACTTTCCAGCAACTTTGGA
GCCATCTCCTCTGTGCTGAATGACATCCTGAGCAGACTGGACAAGGTGGAGGCTGAGGTCCAGATTGA
CAGACTGATTACAGGCAGACTCCAATCCCTCCAAACCTATGTGACCCAACAACTTATCAGGGCTGCTG
AGATTAGGGCATCTGCCAACCTGGCTGCCACCAAGATGAGTGAGTGTGTGCTGGGACAAAGCAAGAGG
GTGGACTTCTGTGGCAAGGGCTACCACCTGATGAGTTTTCCACAGTCTGCCCCTCATGGAGTGGTGTT
CCTGCATGTGACCTATGTGCCTGCCCAGGAGAAGAACTTCACCACAGCCCCTGCCATCTGCCATGATG
GCAAGGCTCACTTTCCAAGGGAGGGAGTGTTTGTGAGCAATGGCACCCACTGGTTTGTGACCCAGAGG
AACTTCTATGAACCACAGATTATCACCACAGACAACACCTTTGTGTCTGGCAACTGTGATGTGGTGAT
TGGCATTGTGAACAACACAGTCTATGACCCACTCCAACCTGAACTGGACTCCTTCAAGGAGGAACTGG
ACAAATACTTCAAGAACCACACCAGCCCTGATGTGGACCTGGGAGACATCTCTGGCATCAATGCCTCT
GTGGTGAACATCCAGAAGGAGATTGACAGACTGAATGAGGTGGCTAAGAACCTGAATGAGTCCCTGAT
TGACCTCCAAGAACTGGGCAAAtaagtttaaacccgctgatcagcctcgactgtgccttctagttgcc
agccatctgttgtttgcccctcccccgtgccttccttgaccctggaaggtgccactcccactgtcctt
tcctaataaaatgaggaaattgcatcgcattgtctgagtaggtgtcattctattctggggggtggggt
ggggcaggacagcaagggggaggattgggaagacaatagcaggcatgctggggatgcggtgggctcta
tggcttctgaggcggaaagaaccagctggggctctagggggtatccccacgcgccctgtagcggcgca
ttaagcgcggcgggtgtggtggttacgcgcagcgtgaccgctacacttgccagcgccctagcgcccgc
tcctttcgctttcttcccttcctttctcgccacgttcgccggctttccccgtcaagctctaaatcggg
ggctccctttagggttccgatttagtgctttacggcacctcgaccccaaaaaacttgattagggtgat
ggttcacgtagtgggccatcgccctgatagacggtttttcgccctttgacgttggagtccacgttctt
taatagtggactcttgttccaaactggaacaacactcaaccctatctcggtctattcttttgatttat
aagggattttgccgatttcggcctattggttaaaaaatgagctgatttaacaaaaatttaacgcgaat
taattctgtggaatgtgtgtcagttagggtgtggaaagtccccaggctccccagcaggcagaagtatg
caaagcatgcatctcaattagtcagcaaccaggtgtggaaagtccccaggctccccagcaggcagaag
tatgcaaagcatgcatctcaattagtcagcaaccatagtcccgcccctaactccgcccatcccgcccc
taactccgcccagttccgcccattctccgccccatggctgactaattttttttatttatgcagaggcc
gaggccgcctctgcctctgagctattccagaagtagtgaggaggcttttttggaggcctaggcttttg
caaaaagctcccgggagcttgtatatccattttcggatctgatcaagagacaggatgaggatcgtttc
gcatgattgaacaagatggattgcacgcaggttctccggccgcttgggtggagaggctattcggctat
gactgggcacaacagacaatcggctgctctgatgccgccgtgttccggctgtcagcgcaggggcgccc
ggttctttttgtcaagaccgacctgtccggtgccctgaatgaactgcaggacgaggcagcgcggctat
cgtggctggccacgacgggcgttccttgcgcagctgtgctcgacgttgtcactgaagcgggaagggac
tggctgctattgggcgaagtgccggggcaggatctcctgtcatctcaccttgctcctgccgagaaagt
atccatcatggctgatgcaatgcggcggctgcatacgcttgatccggctacctgcccattcgaccacc
aagcgaaacatcgcatcgagcgagcacgtactcggatggaagccggtcttgtcgatcaggatgatctg
gacgaagagcatcaggggctcgcgccagccgaactgttcgccaggctcaaggcgcgcatgcccgacgg
cgaggatctcgtcgtgacccatggcgatgcctgcttgccgaatatcatggtggaaaatggccgctttt
ctggattcatcgactgtggccggctgggtgtggcggaccgctatcaggacatagcgttggctacccgt
gatattgctgaagagcttggcggcgaatgggctgaccgcttcctcgtgctttacggtatcgccgctcc
cgattcgcagcgcatcgccttctatcgccttcttgacgagttcttctgagcgggactctggggttcga
aatgaccgaccaagcgacgcccaacctgccatcacgagatttcgattccaccgccgccttctatgaaa
ggttgggcttcggaatcgttttccgggacgccggctggatgatcctccagcgcggggatctcatgctg
gagttcttcgcccaccccaacttgtttattgcagcttataatggttacaaataaagcaatagcatcac
aaatttcacaaataaagcatttttttcactgcattctagttgtggtttgtccaaactcatcaatgtat
cttatcatgtctgtataccgtcgacctctagctagagcttggcgtaatcatggtcatagctgtttcct
gtgtgaaattgttatccgctcacaattccacacaacatacgagccggaagcataaagtgtaaagcctg
gggtgcctaatgagtgagctaactcacattaattgcgttgcgctcactgcccgctttccagtcgggaa
acctgtcgtgccagctgcattaatgaatcggccaacgcgcggggagaggcggtttgcgtattgggcgc
tcttccgcttcctcgctcactgactcgctgcgctcggtcgttcggctgcggcgagcggtatcagctca
ctcaaaggcggtaatacggttatccacagaatcaggggataacgcaggaaagaacatgtgagcaaaag
gccagcaaaaggccaggaaccgtaaaaaggccgcgttgctggcgtttttccataggctccgcccccct
gacgagcatcacaaaaatcgacgctcaagtcagaggtggcgaaacccgacaggactataaagatacca
ggcgtttccccctggaagctccctcgtgcgctctcctgttccgaccctgccgcttaccggatacctgt
ccgcctttctcccttcgggaagcgtggcgctttctcatagctcacgctgtaggtatctcagttcggtg
taggtcgttcgctccaagctgggctgtgtgcacgaaccccccgttcagcccgaccgctgcgccttatc
cggtaactatcgtcttgagtccaacccggtaagacacgacttatcgccactggcagcagccactggta
acaggattagcagagcgaggtatgtaggcggtgctacagagttcttgaagtggtggcctaactacggc
tacactagaagaacagtatttggtatctgcgctctgctgaagccagttaccttcggaaaaagagttgg
tagctcttgatccggcaaacaaaccaccgctggtagcggtttttttgtttgcaagcagcagattacgc
gcagaaaaaaaggatctcaagaagatcctttgatcttttctacggggtctgacgctcagtggaacgaa
aactcacgttaagggattttggtcatgagattatcaaaaaggatcttcacctagatccttttaaatta
aaaatgaagttttaaatcaatctaaagtatatatgagtaaacttggtctgacagttaccaatgcttaa
tcagtgaggcacctatctcagcgatctgtctatttcgttcatccatagttgcctgactccccgtcgtg
tagataactacgatacgggagggcttaccatctggccccagtgctgcaatgataccgcgagacccacg
ctcaccggctccagatttatcagcaataaaccagccagccggaagggccgagcgcagaagtggtcctg
caactttatccgcctccatccagtctattaattgttgccgggaagctagagtaagtagttcgccagtt
aatagtttgcgcaacgttgttgccattgctacaggcatcgtggtgtcacgctcgtcgtttggtatggc
ttcattcagctccggttcccaacgatcaaggcgagttacatgatcccccatgttgtgcaaaaaagcgg
ttagctccttcggtcctccgatcgttgtcagaagtaagttggccgcagtgttatcactcatggttatg
gcagcactgcataattctcttactgtcatgccatccgtaagatgcttttctgtgactggtgagtactc
aaccaagtcattctgagaatagtgtatgcggcgaccgagttgctcttgcccggcgtcaatacgggata
ataccgcgccacatagcagaactttaaaagtgctcatcattggaaaacgttcttcggggcgaaaactc
tcaaggatcttaccgctgttgagatccagttcgatgtaacccactcgtgcacccaactgatcttcagc
atcttttactttcaccagcgtttctgggtgagcaaaaacaggaaggcaaaatgccgcaaaaaagggaa
taagggcgacacggaaatgttgaatactcatactcttcctttttcaatattattgaagcatttatcag
ggttattgtctcatgagcggatacatatttgaatgtatttagaaaaataaacaaataggggttccgcg
cacatttccccgaaaagtgccacctgacgtc
pMD120_pcDNA3.1_SARS-CoV-2_spike_VG40589-UT
SEQ ID NO: 96
gacggatcgggagatctcccgatcccctatggtgcactctcagtacaatctgctctgatgccgcatag
ttaagccagtatctgctccctgcttgtgtgttggaggtcgctgagtagtgcgcgagcaaaatttaagc
tacaacaaggcaaggcttgaccgacaattgcatgaagaatctgcttagggttaggcgttttgcgctgc
ttcgcgatgtacgggccagatatacgcgttgacattgattattgactagttattaatagtaatcaatt
acggggtcattagttcatagcccatatatggagttccgcgttacataacttacggtaaatggcccgcc
tggctgaccgcccaacgacccccgcccattgacgtcaataatgacgtatgttcccatagtaacgccaa
tagggactttccattgacgtcaatgggtggagtatttacggtaaactgcccacttggcagtacatcaa
gtgtatcatatgccaagtacgccccctattgacgtcaatgacggtaaatggcccgcctggcattatgc
ccagtacatgaccttatgggactttcctacttggcagtacatctacgtattagtcatcgctattacca
tggtgatgcggttttggcagtacatcaatgggcgtggatagcggtttgactcacggggatttccaagt
ctccaccccattgacgtcaatgggagtttgttttggcaccaaaatcaacgggactttccaaaatgtcg
taacaactccgccccattgacgcaaatgggcggtaggcgtgtacggtgggaggtctatataagcagag
ctctctggctaactagagaacccactgcttactggcttatcgaaattaatacgactcactatagggag
acccaagctggATGTTTGTGTTCCTGGTGCTGCTGCCACTGGTGTCCAGCCAGTGTGTGAACCTGACC
ACCAGGACCCAACTTCCTCCTGCCTACACCAACTCCTTCACCAGGGGAGTCTACTACCCTGACAAGGT
GTTCAGGTCCTCTGTGCTGCACAGCACCCAGGACCTGTTCCTGCCATTCTTCAGCAATGTGACCTGGT
TCCATGCCATCCATGTGTCTGGCACCAATGGCACCAAGAGGTTTGACAACCCTGTGCTGCCATTCAAT
GATGGAGTCTACTTTGCCAGCACAGAGAAGAGCAACATCATCAGGGGCTGGATTTTTGGCACCACCCT
GGACAGCAAGACCCAGTCCCTGCTGATTGTGAACAATGCCACCAATGTGGTGATTAAGGTGTGTGAGT
TCCAGTTCTGTAATGACCCATTCCTGGGAGTCTACTACCACAAGAACAACAAGTCCTGGATGGAGTCT
GAGTTCAGGGTCTACTCCTCTGCCAACAACTGTACCTTTGAATATGTGAGCCAACCATTCCTGATGGA
CTTGGAGGGCAAGCAGGGCAACTTCAAGAACCTGAGGGAGTTTGTGTTCAAGAACATTGATGGCTACT
TCAAGATTTACAGCAAACACACACCAATCAACCTGGTGAGGGACCTGCCACAGGGCTTCTCTGCCTTG
GAACCACTGGTGGACCTGCCAATTGGCATCAACATCACCAGGTTCCAGACCCTGCTGGCTCTGCACAG
GTCCTACCTGACACCTGGAGACTCCTCCTCTGGCTGGACAGCAGGAGCAGCAGCCTACTATGTGGGCT
ACCTCCAACCAAGGACCTTCCTGCTGAAATACAATGAGAATGGCACCATCACAGATGCTGTGGACTGT
GCCCTGGACCCACTGTCTGAGACCAAGTGTACCCTGAAATCCTTCACAGTGGAGAAGGGCATCTACCA
GACCAGCAACTTCAGGGTCCAACCAACAGAGAGCATTGTGAGGTTTCCAAACATCACCAACCTGTGTC
CATTTGGAGAGGTGTTCAATGCCACCAGGTTTGCCTCTGTCTATGCCTGGAACAGGAAGAGGATTAGC
AACTGTGTGGCTGACTACTCTGTGCTCTACAACTCTGCCTCCTTCAGCACCTTCAAGTGTTATGGAGT
GAGCCCAACCAAACTGAATGACCTGTGTTTCACCAATGTCTATGCTGACTCCTTTGTGATTAGGGGAG
ATGAGGTGAGACAGATTGCCCCTGGACAAACAGGCAAGATTGCTGACTACAACTACAAACTGCCTGAT
GACTTCACAGGCTGTGTGATTGCCTGGAACAGCAACAACCTGGACAGCAAGGTGGGAGGCAACTACAA
CTACCTCTACAGACTGTTCAGGAAGAGCAACCTGAAACCATTTGAGAGGGACATCAGCACAGAGATTT
ACCAGGCTGGCAGCACACCATGTAATGGAGTGGAGGGCTTCAACTGTTACTTTCCACTCCAATCCTAT
GGCTTCCAACCAACCAATGGAGTGGGCTACCAACCATACAGGGTGGTGGTGCTGTCCTTTGAACTGCT
CCATGCCCCTGCCACAGTGTGTGGACCAAAGAAGAGCACCAACCTGGTGAAGAACAAGTGTGTGAACT
TCAACTTCAATGGACTGACAGGCACAGGAGTGCTGACAGAGAGCAACAAGAAGTTCCTGCCATTCCAA
CAGTTTGGCAGGGACATTGCTGACACCACAGATGCTGTGAGGGACCCACAGACCTTGGAGATTCTGGA
CATCACACCATGTTCCTTTGGAGGAGTGTCTGTGATTACACCTGGCACCAACACCAGCAACCAGGTGG
CTGTGCTCTACCAGGATGTGAACTGTACTGAGGTGCCTGTGGCTATCCATGCTGACCAACTTACACCA
ACCTGGAGGGTCTACAGCACAGGCAGCAATGTGTTCCAGACCAGGGCTGGCTGTCTGATTGGAGCAGA
GCATGTGAACAACTCCTATGAGTGTGACATCCCAATTGGAGCAGGCATCTGTGCCTCCTACCAGACCC
AGACCAACAGCCCAAGGAGGGCAAGGTCTGTGGCAAGCCAGAGCATCATTGCCTACACAATGAGTCTG
GGAGCAGAGAACTCTGTGGCTTACAGCAACAACAGCATTGCCATCCCAACCAACTTCACCATCTCTGT
GACCACAGAGATTCTGCCTGTGAGTATGACCAAGACCTCTGTGGACTGTACAATGTATATCTGTGGAG
ACAGCACAGAGTGTAGCAACCTGCTGCTCCAATATGGCTCCTTCTGTACCCAACTTAACAGGGCTCTG
ACAGGCATTGCTGTGGAACAGGACAAGAACACCCAGGAGGTGTTTGCCCAGGTGAAGCAGATTTACAA
GACACCTCCAATCAAGGACTTTGGAGGCTTCAACTTCAGCCAGATTCTGCCTGACCCAAGCAAGCCAA
GCAAGAGGTCCTTCATTGAGGACCTGCTGTTCAACAAGGTGACCCTGGCTGATGCTGGCTTCATCAAG
CAATATGGAGACTGTCTGGGAGACATTGCTGCCAGGGACCTGATTTGTGCCCAGAAGTTCAATGGACT
GACAGTGCTGCCTCCACTGCTGACAGATGAGATGATTGCCCAATACACCTCTGCCCTGCTGGCTGGCA
CCATCACCTCTGGCTGGACCTTTGGAGCAGGAGCAGCCCTCCAAATCCCATTTGCTATGCAGATGGCT
TACAGGTTCAATGGCATTGGAGTGACCCAGAATGTGCTCTATGAGAACCAGAAACTGATTGCCAACCA
GTTCAACTCTGCCATTGGCAAGATTCAGGACTCCCTGTCCAGCACAGCCTCTGCCCTGGGCAAACTCC
AAGATGTGGTGAACCAGAATGCCCAGGCTCTGAACACCCTGGTGAAGCAACTTTCCAGCAACTTTGGA
GCCATCTCCTCTGTGCTGAATGACATCCTGAGCAGACTGGACAAGGTGGAGGCTGAGGTCCAGATTGA
CAGACTGATTACAGGCAGACTCCAATCCCTCCAAACCTATGTGACCCAACAACTTATCAGGGCTGCTG
AGATTAGGGCATCTGCCAACCTGGCTGCCACCAAGATGAGTGAGTGTGTGCTGGGACAAAGCAAGAGG
GTGGACTTCTGTGGCAAGGGCTACCACCTGATGAGTTTTCCACAGTCTGCCCCTCATGGAGTGGTGTT
CCTGCATGTGACCTATGTGCCTGCCCAGGAGAAGAACTTCACCACAGCCCCTGCCATCTGCCATGATG
GCAAGGCTCACTTTCCAAGGGAGGGAGTGTTTGTGAGCAATGGCACCCACTGGTTTGTGACCCAGAGG
AACTTCTATGAACCACAGATTATCACCACAGACAACACCTTTGTGTCTGGCAACTGTGATGTGGTGAT
TGGCATTGTGAACAACACAGTCTATGACCCACTCCAACCTGAACTGGACTCCTTCAAGGAGGAACTGG
ACAAATACTTCAAGAACCACACCAGCCCTGATGTGGACCTGGGAGACATCTCTGGCATCAATGCCTCT
GTGGTGAACATCCAGAAGGAGATTGACAGACTGAATGAGGTGGCTAAGAACCTGAATGAGTCCCTGAT
TGACCTCCAAGAACTGGGCAAATATGAACAATACATCAAGTGGCCATGGTACATCTGGCTGGGCTTCA
TTGCTGGACTGATTGCCATTGTGATGGTGACCATAATGCTGTGTTGTATGACCTCCTGTTGTTCCTGT
CTGAAAGGCTGTTGTTCCTGTGGCTCCTGTTGTAAGTTTGATGAGGATGACTCTGAACCTGTGCTGAA
AGGAGTGAAACTGCACTACACCTGAgtttaaacccgctgatcagcctcgactgtgccttctagttgcc
agccatctgttgtttgcccctcccccgtgccttccttgaccctggaaggtgccactcccactgtcctt
tcctaataaaatgaggaaattgcatcgcattgtctgagtaggtgtcattctattctggggggtggggt
ggggcaggacagcaagggggaggattgggaagacaatagcaggcatgctggggatgcggtgggctcta
tggcttctgaggcggaaagaaccagctggggctctagggggtatccccacgcgccctgtagcggcgca
ttaagcgcggcgggtgtggtggttacgcgcagcgtgaccgctacacttgccagcgccctagcgcccgc
tcctttcgctttcttcccttcctttctcgccacgttcgccggctttccccgtcaagctctaaatcggg
ggctccctttagggttccgatttagtgctttacggcacctcgaccccaaaaaacttgattagggtgat
ggttcacgtagtgggccatcgccctgatagacggtttttcgccctttgacgttggagtccacgttctt
taatagtggactcttgttccaaactggaacaacactcaaccctatctcggtctattcttttgatttat
aagggattttgccgatttcggcctattggttaaaaaatgagctgatttaacaaaaatttaacgcgaat
taattctgtggaatgtgtgtcagttagggtgtggaaagtccccaggctccccagcaggcagaagtatg
caaagcatgcatctcaattagtcagcaaccaggtgtggaaagtccccaggctccccagcaggcagaag
tatgcaaagcatgcatctcaattagtcagcaaccatagtcccgcccctaactccgcccatcccgcccc
taactccgcccagttccgcccattctccgccccatggctgactaattttttttatttatgcagaggcc
gaggccgcctctgcctctgagctattccagaagtagtgaggaggcttttttggaggcctaggcttttg
caaaaagctcccgggagcttgtatatccattttcggatctgatcaagagacaggatgaggatcgtttc
gcatgattgaacaagatggattgcacgcaggttctccggccgcttgggtggagaggctattcggctat
gactgggcacaacagacaatcggctgctctgatgccgccgtgttccggctgtcagcgcaggggcgccc
ggttctttttgtcaagaccgacctgtccggtgccctgaatgaactgcaggacgaggcagcgcggctat
cgtggctggccacgacgggcgttccttgcgcagctgtgctcgacgttgtcactgaagcgggaagggac
tggctgctattgggcgaagtgccggggcaggatctcctgtcatctcaccttgctcctgccgagaaagt
atccatcatggctgatgcaatgcggcggctgcatacgcttgatccggctacctgcccattcgaccacc
aagcgaaacatcgcatcgagcgagcacgtactcggatggaagccggtcttgtcgatcaggatgatctg
gacgaagagcatcaggggctcgcgccagccgaactgttcgccaggctcaaggcgcgcatgcccgacgg
cgaggatctcgtcgtgacccatggcgatgcctgcttgccgaatatcatggtggaaaatggccgctttt
ctggattcatcgactgtggccggctgggtgtggcggaccgctatcaggacatagcgttggctacccgt
gatattgctgaagagcttggcggcgaatgggctgaccgcttcctcgtgctttacggtatcgccgctcc
cgattcgcagcgcatcgccttctatcgccttcttgacgagttcttctgagcgggactctggggttcga
aatgaccgaccaagcgacgcccaacctgccatcacgagatttcgattccaccgccgccttctatgaaa
ggttgggcttcggaatcgttttccgggacgccggctggatgatcctccagcgcggggatctcatgctg
gagttcttcgcccaccccaacttgtttattgcagcttataatggttacaaataaagcaatagcatcac
aaatttcacaaataaagcatttttttcactgcattctagttgtggtttgtccaaactcatcaatgtat
cttatcatgtctgtataccgtcgacctctagctagagcttggcgtaatcatggtcatagctgtttcct
gtgtgaaattgttatccgctcacaattccacacaacatacgagccggaagcataaagtgtaaagcctg
gggtgcctaatgagtgagctaactcacattaattgcgttgcgctcactgcccgctttccagtcgggaa
acctgtcgtgccagctgcattaatgaatcggccaacgcgcggggagaggcggtttgcgtattgggcgc
tcttccgcttcctcgctcactgactcgctgcgctcggtcgttcggctgcggcgagcggtatcagctca
ctcaaaggcggtaatacggttatccacagaatcaggggataacgcaggaaagaacatgtgagcaaaag
gccagcaaaaggccaggaaccgtaaaaaggccgcgttgctggcgtttttccataggctccgcccccct
gacgagcatcacaaaaatcgacgctcaagtcagaggtggcgaaacccgacaggactataaagatacca
ggcgtttccccctggaagctccctcgtgcgctctcctgttccgaccctgccgcttaccggatacctgt
ccgcctttctcccttcgggaagcgtggcgctttctcatagctcacgctgtaggtatctcagttcggtg
taggtcgttcgctccaagctgggctgtgtgcacgaaccccccgttcagcccgaccgctgcgccttatc
cggtaactatcgtcttgagtccaacccggtaagacacgacttatcgccactggcagcagccactggta
acaggattagcagagcgaggtatgtaggcggtgctacagagttcttgaagtggtggcctaactacggc
tacactagaagaacagtatttggtatctgcgctctgctgaagccagttaccttcggaaaaagagttgg
tagctcttgatccggcaaacaaaccaccgctggtagcggtttttttgtttgcaagcagcagattacgc
gcagaaaaaaaggatctcaagaagatcctttgatcttttctacggggtctgacgctcagtggaacgaa
aactcacgttaagggattttggtcatgagattatcaaaaaggatcttcacctagatccttttaaatta
aaaatgaagttttaaatcaatctaaagtatatatgagtaaacttggtctgacagttaccaatgcttaa
tcagtgaggcacctatctcagcgatctgtctatttcgttcatccatagttgcctgactccccgtcgtg
tagataactacgatacgggagggcttaccatctggccccagtgctgcaatgataccgcgagacccacg
ctcaccggctccagatttatcagcaataaaccagccagccggaagggccgagcgcagaagtggtcctg
caactttatccgcctccatccagtctattaattgttgccgggaagctagagtaagtagttcgccagtt
aatagtttgcgcaacgttgttgccattgctacaggcatcgtggtgtcacgctcgtcgtttggtatggc
ttcattcagctccggttcccaacgatcaaggcgagttacatgatcccccatgttgtgcaaaaaagcgg
ttagctccttcggtcctccgatcgttgtcagaagtaagttggccgcagtgttatcactcatggttatg
gcagcactgcataattctcttactgtcatgccatccgtaagatgcttttctgtgactggtgagtactc
aaccaagtcattctgagaatagtgtatgcggcgaccgagttgctcttgcccggcgtcaatacgggata
ataccgcgccacatagcagaactttaaaagtgctcatcattggaaaacgttcttcggggcgaaaactc
tcaaggatcttaccgctgttgagatccagttcgatgtaacccactcgtgcacccaactgatcttcagc
atcttttactttcaccagcgtttctgggtgagcaaaaacaggaaggcaaaatgccgcaaaaaagggaa
taagggcgacacggaaatgttgaatactcatactcttcctttttcaatattattgaagcatttatcag
ggttattgtctcatgagcggatacatatttgaatgtatttagaaaaataaacaaataggggttccgcg
cacatttccccgaaaagtgccacctgacgtc
pMD121_pcDNA3_SARS-CoV-2_spike_mut_v1
SEQ ID NO: 97
gacggatcgggagatctcccgatcccctatggtgcactctcagtacaatctgctctgatgccgcatag
ttaagccagtatctgctccctgcttgtgtgttggaggtcgctgagtagtgcgcgagcaaaatttaagc
tacaacaaggcaaggcttgaccgacaattgcatgaagaatctgcttagggttaggcgttttgcgctgc
ttcgcgatgtacgggccagatatacgcgttgacattgattattgactagttattaatagtaatcaatt
acggggtcattagttcatagcccatatatggagttccgcgttacataacttacggtaaatggcccgcc
tggctgaccgcccaacgacccccgcccattgacgtcaataatgacgtatgttcccatagtaacgccaa
tagggactttccattgacgtcaatgggtggagtatttacggtaaactgcccacttggcagtacatcaa
gtgtatcatatgccaagtacgccccctattgacgtcaatgacggtaaatggcccgcctggcattatgc
ccagtacatgaccttatgggactttcctacttggcagtacatctacgtattagtcatcgctattacca
tggtgatgcggttttggcagtacatcaatgggcgtggatagcggtttgactcacggggatttccaagt
ctccaccccattgacgtcaatgggagtttgttttggcaccaaaatcaacgggactttccaaaatgtcg
taacaactccgccccattgacgcaaatgggcggtaggcgtgtacggtgggaggtctatataagcagag
ctctctggctaactagagaacccactgcttactggcttatcgaaattaatacgactcactatagggag
acccaagctggATGTTTGTGTTCCTGGTGCTGCTGCCACTGGTGTCCAGCCAGTGTGTGAACCTGACC
ACCAGGACCCAACTTCCTCCTGCCTACACCAACTCCTTCACCAGGGGAGTCTACTACCCTGACAAGGT
GTTCAGGTCCTCTGTGCTGCACAGCACCCAGGACCTGTTCCTGCCATTCTTCAGCAATGTGACCTGGT
TCCATGCCATCCATGTGTCTGGCACCAATGGCACCAAGAGGTTTGACAACCCTGTGCTGCCATTCAAT
GATGGAGTCTACTTTGCCAGCACAGAGAAGAGCAACATCATCAGGGGCTGGATTTTTGGCACCACCCT
GGACAGCAAGACCCAGTCCCTGCTGATTGTGAACAATGCCACCAATGTGGTGATTAAGGTGTGTGAGT
TCCAGTTCTGTAATGACCCATTCCTGGGAGTCTACTACCACAAGAACAACAAGTCCTGGATGGAGTCT
GAGTTCAGGGTCTACTCCTCTGCCAACAACTGTACCTTTGAATATGTGAGCCAACCATTCCTGATGGA
CTTGGAGGGCAAGCAGGGCAACTTCAAGAACCTGAGGGAGTTTGTGTTCAAGAACATTGATGGCTACT
TCAAGATTTACAGCAAACACACACCAATCAACCTGGTGAGGGACCTGCCACAGGGCTTCTCTGCCTTG
GAACCACTGGTGGACCTGCCAATTGGCATCAACATCACCAGGTTCCAGACCCTGCTGGCTCTGCACAG
GTCCTACCTGACACCTGGAGACTCCTCCTCTGGCTGGACAGCAGGAGCAGCAGCCTACTATGTGGGCT
ACCTCCAACCAAGGACCTTCCTGCTGAAATACAATGAGAATGGCACCATCACAGATGCTGTGGACTGT
GCCCTGGACCCACTGTCTGAGACCAAGTGTACCCTGAAATCCTTCACAGTGGAGAAGGGCATCTACCA
GACCAGCAACTTCAGGGTCCAACCAACAGAGAGCATTGTGAGGTTTCCAAACATCACCAACCTGTGTC
CATTTGGAGAGGTGTTCAATGCCACCAGGTTTGCCTCTGTCTATGCCTGGAACAGGAAGAGGATTAGC
AACTGTGTGGCTGACTACTCTGTGCTCTACAACTCTGCCTCCTTCAGCACCTTCAAGTGTTATGGAGT
GAGCCCAACCAAACTGAATGACCTGTGTTTCACCAATGTCTATGCTGACTCCTTTGTGATTAGGGGAG
ATGAGGTGAGACAGATTGCCCCTGGACAAACAGGCAAGATTGCTGACTACAACTACAAACTGCCTGAT
GACTTCACAGGCTGTGTGATTGCCTGGAACAGCgccAACCTGGACAGCAAGGTGGGAGGCAACgccAA
CTACCTCTACAGACTGTTCAGGAAGAGCAACCTGAAACCATTTGAGAGGGACATCAGCACAGAGATTT
ACCAGGCTGGCAGCACACCATGTAATGGAGTGGAGGGCTTCAACTGTTACTTTCCACTCCAATCCTAT
GGCTTCgccCCAgctgccGGAGTGGGCTACCAACCATACAGGGTGGTGGTGCTGTCCTTTGAACTGCT
CCATGCCCCTGCCACAGTGTGTGGACCAAAGAAGAGCACCAACCTGGTGAAGAACAAGTGTGTGAACT
TCAACTTCAATGGACTGACAGGCACAGGAGTGCTGACAGAGAGCAACAAGAAGTTCCTGCCATTCCAA
CAGTTTGGCAGGGACATTGCTGACACCACAGATGCTGTGAGGGACCCACAGACCTTGGAGATTCTGGA
CATCACACCATGTTCCTTTGGAGGAGTGTCTGTGATTACACCTGGCACCAACACCAGCAACCAGGTGG
CTGTGCTCTACCAGGATGTGAACTGTACTGAGGTGCCTGTGGCTATCCATGCTGACCAACTTACACCA
ACCTGGAGGGTCTACAGCACAGGCAGCAATGTGTTCCAGACCAGGGCTGGCTGTCTGATTGGAGCAGA
GCATGTGAACAACTCCTATGAGTGTGACATCCCAATTGGAGCAGGCATCTGTGCCTCCTACCAGACCC
AGACCAACAGCCCAAGGAGGGCAAGGTCTGTGGCAAGCCAGAGCATCATTGCCTACACAATGAGTCTG
GGAGCAGAGAACTCTGTGGCTTACAGCAACAACAGCATTGCCATCCCAACCAACTTCACCATCTCTGT
GACCACAGAGATTCTGCCTGTGAGTATGACCAAGACCTCTGTGGACTGTACAATGTATATCTGTGGAG
ACAGCACAGAGTGTAGCAACCTGCTGCTCCAATATGGCTCCTTCTGTACCCAACTTAACAGGGCTCTG
ACAGGCATTGCTGTGGAACAGGACAAGAACACCCAGGAGGTGTTTGCCCAGGTGAAGCAGATTTACAA
GACACCTCCAATCAAGGACTTTGGAGGCTTCAACTTCAGCCAGATTCTGCCTGACCCAAGCAAGCCAA
GCAAGAGGTCCTTCATTGAGGACCTGCTGTTCAACAAGGTGACCCTGGCTGATGCTGGCTTCATCAAG
CAATATGGAGACTGTCTGGGAGACATTGCTGCCAGGGACCTGATTTGTGCCCAGAAGTTCAATGGACT
GACAGTGCTGCCTCCACTGCTGACAGATGAGATGATTGCCCAATACACCTCTGCCCTGCTGGCTGGCA
CCATCACCTCTGGCTGGACCTTTGGAGCAGGAGCAGCCCTCCAAATCCCATTTGCTATGCAGATGGCT
TACAGGTTCAATGGCATTGGAGTGACCCAGAATGTGCTCTATGAGAACCAGAAACTGATTGCCAACCA
GTTCAACTCTGCCATTGGCAAGATTCAGGACTCCCTGTCCAGCACAGCCTCTGCCCTGGGCAAACTCC
AAGATGTGGTGAACCAGAATGCCCAGGCTCTGAACACCCTGGTGAAGCAACTTTCCAGCAACTTTGGA
GCCATCTCCTCTGTGCTGAATGACATCCTGAGCAGACTGGACAAGGTGGAGGCTGAGGTCCAGATTGA
CAGACTGATTACAGGCAGACTCCAATCCCTCCAAACCTATGTGACCCAACAACTTATCAGGGCTGCTG
AGATTAGGGCATCTGCCAACCTGGCTGCCACCAAGATGAGTGAGTGTGTGCTGGGACAAAGCAAGAGG
GTGGACTTCTGTGGCAAGGGCTACCACCTGATGAGTTTTCCACAGTCTGCCCCTCATGGAGTGGTGTT
CCTGCATGTGACCTATGTGCCTGCCCAGGAGAAGAACTTCACCACAGCCCCTGCCATCTGCCATGATG
GCAAGGCTCACTTTCCAAGGGAGGGAGTGTTTGTGAGCAATGGCACCCACTGGTTTGTGACCCAGAGG
AACTTCTATGAACCACAGATTATCACCACAGACAACACCTTTGTGTCTGGCAACTGTGATGTGGTGAT
TGGCATTGTGAACAACACAGTCTATGACCCACTCCAACCTGAACTGGACTCCTTCAAGGAGGAACTGG
ACAAATACTTCAAGAACCACACCAGCCCTGATGTGGACCTGGGAGACATCTCTGGCATCAATGCCTCT
GTGGTGAACATCCAGAAGGAGATTGACAGACTGAATGAGGTGGCTAAGAACCTGAATGAGTCCCTGAT
TGACCTCCAAGAACTGGGCAAATATGAACAATACATCAAGTGGCCATGGTACATCTGGCTGGGCTTCA
TTGCTGGACTGATTGCCATTGTGATGGTGACCATAATGCTGTGTTGTATGACCTCCTGTTGTTCCTGT
CTGAAAGGCTGTTGTTCCTGTGGCTCCTGTTGTAAGTTTGATGAGGATGACTCTGAACCTGTGCTGAA
AGGAGTGAAACTGCACTACACCTGAgtttaaacccgctgatcagcctcgactgtgccttctagttgcc
agccatctgttgtttgcccctcccccgtgccttccttgaccctggaaggtgccactcccactgtcctt
tcctaataaaatgaggaaattgcatcgcattgtctgagtaggtgtcattctattctggggggtggggt
ggggcaggacagcaagggggaggattgggaagacaatagcaggcatgctggggatgcggtgggctcta
tggcttctgaggcggaaagaaccagctggggctctagggggtatccccacgcgccctgtagcggcgca
ttaagcgcggcgggtgtggtggttacgcgcagcgtgaccgctacacttgccagcgccctagcgcccgc
tcctttcgctttcttcccttcctttctcgccacgttcgccggctttccccgtcaagctctaaatcggg
ggctccctttagggttccgatttagtgctttacggcacctcgaccccaaaaaacttgattagggtgat
ggttcacgtagtgggccatcgccctgatagacggtttttcgccctttgacgttggagtccacgttctt
taatagtggactcttgttccaaactggaacaacactcaaccctatctcggtctattcttttgatttat
aagggattttgccgatttcggcctattggttaaaaaatgagctgatttaacaaaaatttaacgcgaat
taattctgtggaatgtgtgtcagttagggtgtggaaagtccccaggctccccagcaggcagaagtatg
caaagcatgcatctcaattagtcagcaaccaggtgtggaaagtccccaggctccccagcaggcagaag
tatgcaaagcatgcatctcaattagtcagcaaccatagtcccgcccctaactccgcccatcccgcccc
taactccgcccagttccgcccattctccgccccatggctgactaattttttttatttatgcagaggcc
gaggccgcctctgcctctgagctattccagaagtagtgaggaggcttttttggaggcctaggcttttg
caaaaagctcccgggagcttgtatatccattttcggatctgatcaagagacaggatgaggatcgtttc
gcatgattgaacaagatggattgcacgcaggttctccggccgcttgggtggagaggctattcggctat
gactgggcacaacagacaatcggctgctctgatgccgccgtgttccggctgtcagcgcaggggcgccc
ggttctttttgtcaagaccgacctgtccggtgccctgaatgaactgcaggacgaggcagcgcggctat
cgtggctggccacgacgggcgttccttgcgcagctgtgctcgacgttgtcactgaagcgggaagggac
tggctgctattgggcgaagtgccggggcaggatctcctgtcatctcaccttgctcctgccgagaaagt
atccatcatggctgatgcaatgcggcggctgcatacgcttgatccggctacctgcccattcgaccacc
aagcgaaacatcgcatcgagcgagcacgtactcggatggaagccggtcttgtcgatcaggatgatctg
gacgaagagcatcaggggctcgcgccagccgaactgttcgccaggctcaaggcgcgcatgcccgacgg
cgaggatctcgtcgtgacccatggcgatgcctgcttgccgaatatcatggtggaaaatggccgctttt
ctggattcatcgactgtggccggctgggtgtggcggaccgctatcaggacatagcgttggctacccgt
gatattgctgaagagcttggcggcgaatgggctgaccgcttcctcgtgctttacggtatcgccgctcc
cgattcgcagcgcatcgccttctatcgccttcttgacgagttcttctgagcgggactctggggttcga
aatgaccgaccaagcgacgcccaacctgccatcacgagatttcgattccaccgccgccttctatgaaa
ggttgggcttcggaatcgttttccgggacgccggctggatgatcctccagcgcggggatctcatgctg
gagttcttcgcccaccccaacttgtttattgcagcttataatggttacaaataaagcaatagcatcac
aaatttcacaaataaagcatttttttcactgcattctagttgtggtttgtccaaactcatcaatgtat
cttatcatgtctgtataccgtcgacctctagctagagcttggcgtaatcatggtcatagctgtttcct
gtgtgaaattgttatccgctcacaattccacacaacatacgagccggaagcataaagtgtaaagcctg
gggtgcctaatgagtgagctaactcacattaattgcgttgcgctcactgcccgctttccagtcgggaa
acctgtcgtgccagctgcattaatgaatcggccaacgcgcggggagaggcggtttgcgtattgggcgc
tcttccgcttcctcgctcactgactcgctgcgctcggtcgttcggctgcggcgagcggtatcagctca
ctcaaaggcggtaatacggttatccacagaatcaggggataacgcaggaaagaacatgtgagcaaaag
gccagcaaaaggccaggaaccgtaaaaaggccgcgttgctggcgtttttccataggctccgcccccct
gacgagcatcacaaaaatcgacgctcaagtcagaggtggcgaaacccgacaggactataaagatacca
ggcgtttccccctggaagctccctcgtgcgctctcctgttccgaccctgccgcttaccggatacctgt
ccgcctttctcccttcgggaagcgtggcgctttctcatagctcacgctgtaggtatctcagttcggtg
taggtcgttcgctccaagctgggctgtgtgcacgaaccccccgttcagcccgaccgctgcgccttatc
cggtaactatcgtcttgagtccaacccggtaagacacgacttatcgccactggcagcagccactggta
acaggattagcagagcgaggtatgtaggcggtgctacagagttcttgaagtggtggcctaactacggc
tacactagaagaacagtatttggtatctgcgctctgctgaagccagttaccttcggaaaaagagttgg
tagctcttgatccggcaaacaaaccaccgctggtagcggtttttttgtttgcaagcagcagattacgc
gcagaaaaaaaggatctcaagaagatcctttgatcttttctacggggtctgacgctcagtggaacgaa
aactcacgttaagggattttggtcatgagattatcaaaaaggatcttcacctagatccttttaaatta
aaaatgaagttttaaatcaatctaaagtatatatgagtaaacttggtctgacagttaccaatgcttaa
tcagtgaggcacctatctcagcgatctgtctatttcgttcatccatagttgcctgactccccgtcgtg
tagataactacgatacgggagggcttaccatctggccccagtgctgcaatgataccgcgagacccacg
ctcaccggctccagatttatcagcaataaaccagccagccggaagggccgagcgcagaagtggtcctg
caactttatccgcctccatccagtctattaattgttgccgggaagctagagtaagtagttcgccagtt
aatagtttgcgcaacgttgttgccattgctacaggcatcgtggtgtcacgctcgtcgtttggtatggc
ttcattcagctccggttcccaacgatcaaggcgagttacatgatcccccatgttgtgcaaaaaagcgg
ttagctccttcggtcctccgatcgttgtcagaagtaagttggccgcagtgttatcactcatggttatg
gcagcactgcataattctcttactgtcatgccatccgtaagatgcttttctgtgactggtgagtactc
aaccaagtcattctgagaatagtgtatgcggcgaccgagttgctcttgcccggcgtcaatacgggata
ataccgcgccacatagcagaactttaaaagtgctcatcattggaaaacgttcttcggggcgaaaactc
tcaaggatcttaccgctgttgagatccagttcgatgtaacccactcgtgcacccaactgatcttcagc
atcttttactttcaccagcgtttctgggtgagcaaaaacaggaaggcaaaatgccgcaaaaaagggaa
taagggcgacacggaaatgttgaatactcatactcttcctttttcaatattattgaagcatttatcag
ggttattgtctcatgagcggatacatatttgaatgtatttagaaaaataaacaaataggggttccgcg
cacatttccccgaaaagtgccacctgacgtc
pMD122_pcDNA3_SARS-CoV-2_spike_mut_v2 copy
SEQ ID NO: 98
gacggatcgggagatctcccgatcccctatggtgcactctcagtacaatctgctctgatgccgcatag
ttaagccagtatctgctccctgcttgtgtgttggaggtcgctgagtagtgcgcgagcaaaatttaagc
tacaacaaggcaaggcttgaccgacaattgcatgaagaatctgcttagggttaggcgttttgcgctgc
ttcgcgatgtacgggccagatatacgcgttgacattgattattgactagttattaatagtaatcaatt
acggggtcattagttcatagcccatatatggagttccgcgttacataacttacggtaaatggcccgcc
tggctgaccgcccaacgacccccgcccattgacgtcaataatgacgtatgttcccatagtaacgccaa
tagggactttccattgacgtcaatgggtggagtatttacggtaaactgcccacttggcagtacatcaa
gtgtatcatatgccaagtacgccccctattgacgtcaatgacggtaaatggcccgcctggcattatgc
ccagtacatgaccttatgggactttcctacttggcagtacatctacgtattagtcatcgctattacca
tggtgatgcggttttggcagtacatcaatgggcgtggatagcggtttgactcacggggatttccaagt
ctccaccccattgacgtcaatgggagtttgttttggcaccaaaatcaacgggactttccaaaatgtcg
taacaactccgccccattgacgcaaatgggcggtaggcgtgtacggtgggaggtctatataagcagag
ctctctggctaactagagaacccactgcttactggcttatcgaaattaatacgactcactatagggag
acccaagctggATGTTTGTGTTCCTGGTGCTGCTGCCACTGGTGTCCAGCCAGTGTGTGAACCTGACC
ACCAGGACCCAACTTCCTCCTGCCTACACCAACTCCTTCACCAGGGGAGTCTACTACCCTGACAAGGT
GTTCAGGTCCTCTGTGCTGCACAGCACCCAGGACCTGTTCCTGCCATTCTTCAGCAATGTGACCTGGT
TCCATGCCATCCATGTGTCTGGCACCAATGGCACCAAGAGGTTTGACAACCCTGTGCTGCCATTCAAT
GATGGAGTCTACTTTGCCAGCACAGAGAAGAGCAACATCATCAGGGGCTGGATTTTTGGCACCACCCT
GGACAGCAAGACCCAGTCCCTGCTGATTGTGAACAATGCCACCAATGTGGTGATTAAGGTGTGTGAGT
TCCAGTTCTGTAATGACCCATTCCTGGGAGTCTACTACCACAAGAACAACAAGTCCTGGATGGAGTCT
GAGTTCAGGGTCTACTCCTCTGCCAACAACTGTACCTTTGAATATGTGAGCCAACCATTCCTGATGGA
CTTGGAGGGCAAGCAGGGCAACTTCAAGAACCTGAGGGAGTTTGTGTTCAAGAACATTGATGGCTACT
TCAAGATTTACAGCAAACACACACCAATCAACCTGGTGAGGGACCTGCCACAGGGCTTCTCTGCCTTG
GAACCACTGGTGGACCTGCCAATTGGCATCAACATCACCAGGTTCCAGACCCTGCTGGCTCTGCACAG
GTCCTACCTGACACCTGGAGACTCCTCCTCTGGCTGGACAGCAGGAGCAGCAGCCTACTATGTGGGCT
ACCTCCAACCAAGGACCTTCCTGCTGAAATACAATGAGAATGGCACCATCACAGATGCTGTGGACTGT
GCCCTGGACCCACTGTCTGAGACCAAGTGTACCCTGAAATCCTTCACAGTGGAGAAGGGCATCTACCA
GACCAGCAACTTCAGGGTCCAACCAACAGAGAGCATTGTGAGGTTTCCAAACATCACCAACCTGTGTC
CATTTGGAGAGGTGTTCAATGCCACCAGGTTTGCCTCTGTCTATGCCTGGAACAGGAAGAGGATTAGC
AACTGTGTGGCTGACTACTCTGTGCTCTACAACTCTGCCTCCTTCAGCACCTTCAAGTGTTATGGAGT
GAGCCCAACCAAACTGAATGACCTGTGTTTCACCAATGTCTATGCTGACTCCTTTGTGATTAGGGGAG
ATGAGGTGAGACAGATTGCCCCTGGACAAACAGGCgccATTGCTGACTACAACTACAAACTGCCTGAT
GACTTCACAGGCTGTGTGATTGCCTGGAACAGCAACAACCTGGACAGCAAGGTGGGAGGCAACTACAA
CTACCTCTACAGAgccgctAGGAAGAGCAACCTGAAACCATTTGAGAGGGACATCAGCACAGAGATTg
ccCAGGCTGGCAGCACACCATGTAATGGAGTGGAGGGCTTCAACTGTTACTTTCCACTCgccTCCTAT
GGCTTCCAACCAACCAATGGAGTGGGCTACCAACCATACAGGGTGGTGGTGCTGTCCTTTGAACTGCT
CCATGCCCCTGCCACAGTGTGTGGACCAAAGAAGAGCACCAACCTGGTGAAGAACAAGTGTGTGAACT
TCAACgccAATGGACTGACAGGCACAGGAGTGCTGACAGAGAGCAACAAGAAGTTCCTGCCATTCCAA
CAGTTTGGCAGGGACATTGCTGACACCACAGATGCTGTGAGGGACCCACAGACCTTGGAGATTCTGGA
CATCACACCATGTTCCTTTGGAGGAGTGTCTGTGATTACACCTGGCACCAACACCAGCAACCAGGTGG
CTGTGCTCTACCAGGATGTGAACTGTACTGAGGTGCCTGTGGCTATCCATGCTGACCAACTTACACCA
ACCTGGAGGGTCTACAGCACAGGCAGCAATGTGTTCCAGACCAGGGCTGGCTGTCTGATTGGAGCAGA
GCATGTGAACAACTCCTATGAGTGTGACATCCCAATTGGAGCAGGCATCTGTGCCTCCTACCAGACCC
AGACCAACAGCCCAAGGAGGGCAAGGTCTGTGGCAAGCCAGAGCATCATTGCCTACACAATGAGTCTG
GGAGCAGAGAACTCTGTGGCTTACAGCAACAACAGCATTGCCATCCCAACCAACTTCACCATCTCTGT
GACCACAGAGATTCTGCCTGTGAGTATGACCAAGACCTCTGTGGACTGTACAATGTATATCTGTGGAG
ACAGCACAGAGTGTAGCAACCTGCTGCTCCAATATGGCTCCTTCTGTACCCAACTTAACAGGGCTCTG
ACAGGCATTGCTGTGGAACAGGACAAGAACACCCAGGAGGTGTTTGCCCAGGTGAAGCAGATTTACAA
GACACCTCCAATCAAGGACTTTGGAGGCTTCAACTTCAGCCAGATTCTGCCTGACCCAAGCAAGCCAA
GCAAGAGGTCCTTCATTGAGGACCTGCTGTTCAACAAGGTGACCCTGGCTGATGCTGGCTTCATCAAG
CAATATGGAGACTGTCTGGGAGACATTGCTGCCAGGGACCTGATTTGTGCCCAGAAGTTCAATGGACT
GACAGTGCTGCCTCCACTGCTGACAGATGAGATGATTGCCCAATACACCTCTGCCCTGCTGGCTGGCA
CCATCACCTCTGGCTGGACCTTTGGAGCAGGAGCAGCCCTCCAAATCCCATTTGCTATGCAGATGGCT
TACAGGTTCAATGGCATTGGAGTGACCCAGAATGTGCTCTATGAGAACCAGAAACTGATTGCCAACCA
GTTCAACTCTGCCATTGGCAAGATTCAGGACTCCCTGTCCAGCACAGCCTCTGCCCTGGGCAAACTCC
AAGATGTGGTGAACCAGAATGCCCAGGCTCTGAACACCCTGGTGAAGCAACTTTCCAGCAACTTTGGA
GCCATCTCCTCTGTGCTGAATGACATCCTGAGCAGACTGGACAAGGTGGAGGCTGAGGTCCAGATTGA
CAGACTGATTACAGGCAGACTCCAATCCCTCCAAACCTATGTGACCCAACAACTTATCAGGGCTGCTG
AGATTAGGGCATCTGCCAACCTGGCTGCCACCAAGATGAGTGAGTGTGTGCTGGGACAAAGCAAGAGG
GTGGACTTCTGTGGCAAGGGCTACCACCTGATGAGTTTTCCACAGTCTGCCCCTCATGGAGTGGTGTT
CCTGCATGTGACCTATGTGCCTGCCCAGGAGAAGAACTTCACCACAGCCCCTGCCATCTGCCATGATG
GCAAGGCTCACTTTCCAAGGGAGGGAGTGTTTGTGAGCAATGGCACCCACTGGTTTGTGACCCAGAGG
AACTTCTATGAACCACAGATTATCACCACAGACAACACCTTTGTGTCTGGCAACTGTGATGTGGTGAT
TGGCATTGTGAACAACACAGTCTATGACCCACTCCAACCTGAACTGGACTCCTTCAAGGAGGAACTGG
ACAAATACTTCAAGAACCACACCAGCCCTGATGTGGACCTGGGAGACATCTCTGGCATCAATGCCTCT
GTGGTGAACATCCAGAAGGAGATTGACAGACTGAATGAGGTGGCTAAGAACCTGAATGAGTCCCTGAT
TGACCTCCAAGAACTGGGCAAATATGAACAATACATCAAGTGGCCATGGTACATCTGGCTGGGCTTCA
TTGCTGGACTGATTGCCATTGTGATGGTGACCATAATGCTGTGTTGTATGACCTCCTGTTGTTCCTGT
CTGAAAGGCTGTTGTTCCTGTGGCTCCTGTTGTAAGTTTGATGAGGATGACTCTGAACCTGTGCTGAA
AGGAGTGAAACTGCACTACACCTGAgtttaaacccgctgatcagcctcgactgtgccttctagttgcc
agccatctgttgtttgcccctcccccgtgccttccttgaccctggaaggtgccactcccactgtcctt
tcctaataaaatgaggaaattgcatcgcattgtctgagtaggtgtcattctattctggggggtggggt
ggggcaggacagcaagggggaggattgggaagacaatagcaggcatgctggggatgcggtgggctcta
tggcttctgaggcggaaagaaccagctggggctctagggggtatccccacgcgccctgtagcggcgca
ttaagcgcggcgggtgtggtggttacgcgcagcgtgaccgctacacttgccagcgccctagcgcccgc
tcctttcgctttcttcccttcctttctcgccacgttcgccggctttccccgtcaagctctaaatcggg
ggctccctttagggttccgatttagtgctttacggcacctcgaccccaaaaaacttgattagggtgat
ggttcacgtagtgggccatcgccctgatagacggtttttcgccctttgacgttggagtccacgttctt
taatagtggactcttgttccaaactggaacaacactcaaccctatctcggtctattcttttgatttat
aagggattttgccgatttcggcctattggttaaaaaatgagctgatttaacaaaaatttaacgcgaat
taattctgtggaatgtgtgtcagttagggtgtggaaagtccccaggctccccagcaggcagaagtatg
caaagcatgcatctcaattagtcagcaaccaggtgtggaaagtccccaggctccccagcaggcagaag
tatgcaaagcatgcatctcaattagtcagcaaccatagtcccgcccctaactccgcccatcccgcccc
taactccgcccagttccgcccattctccgccccatggctgactaattttttttatttatgcagaggcc
gaggccgcctctgcctctgagctattccagaagtagtgaggaggcttttttggaggcctaggcttttg
caaaaagctcccgggagcttgtatatccattttcggatctgatcaagagacaggatgaggatcgtttc
gcatgattgaacaagatggattgcacgcaggttctccggccgcttgggtggagaggctattcggctat
gactgggcacaacagacaatcggctgctctgatgccgccgtgttccggctgtcagcgcaggggcgccc
ggttctttttgtcaagaccgacctgtccggtgccctgaatgaactgcaggacgaggcagcgcggctat
cgtggctggccacgacgggcgttccttgcgcagctgtgctcgacgttgtcactgaagcgggaagggac
tggctgctattgggcgaagtgccggggcaggatctcctgtcatctcaccttgctcctgccgagaaagt
atccatcatggctgatgcaatgcggcggctgcatacgcttgatccggctacctgcccattcgaccacc
aagcgaaacatcgcatcgagcgagcacgtactcggatggaagccggtcttgtcgatcaggatgatctg
gacgaagagcatcaggggctcgcgccagccgaactgttcgccaggctcaaggcgcgcatgcccgacgg
cgaggatctcgtcgtgacccatggcgatgcctgcttgccgaatatcatggtggaaaatggccgctttt
ctggattcatcgactgtggccggctgggtgtggcggaccgctatcaggacatagcgttggctacccgt
gatattgctgaagagcttggcggcgaatgggctgaccgcttcctcgtgctttacggtatcgccgctcc
cgattcgcagcgcatcgccttctatcgccttcttgacgagttcttctgagcgggactctggggttcga
aatgaccgaccaagcgacgcccaacctgccatcacgagatttcgattccaccgccgccttctatgaaa
ggttgggcttcggaatcgttttccgggacgccggctggatgatcctccagcgcggggatctcatgctg
gagttcttcgcccaccccaacttgtttattgcagcttataatggttacaaataaagcaatagcatcac
aaatttcacaaataaagcatttttttcactgcattctagttgtggtttgtccaaactcatcaatgtat
cttatcatgtctgtataccgtcgacctctagctagagcttggcgtaatcatggtcatagctgtttcct
gtgtgaaattgttatccgctcacaattccacacaacatacgagccggaagcataaagtgtaaagcctg
gggtgcctaatgagtgagctaactcacattaattgcgttgcgctcactgcccgctttccagtcgggaa
acctgtcgtgccagctgcattaatgaatcggccaacgcgcggggagaggcggtttgcgtattgggcgc
tcttccgcttcctcgctcactgactcgctgcgctcggtcgttcggctgcggcgagcggtatcagctca
ctcaaaggcggtaatacggttatccacagaatcaggggataacgcaggaaagaacatgtgagcaaaag
gccagcaaaaggccaggaaccgtaaaaaggccgcgttgctggcgtttttccataggctccgcccccct
gacgagcatcacaaaaatcgacgctcaagtcagaggtggcgaaacccgacaggactataaagatacca
ggcgtttccccctggaagctccctcgtgcgctctcctgttccgaccctgccgcttaccggatacctgt
ccgcctttctcccttcgggaagcgtggcgctttctcatagctcacgctgtaggtatctcagttcggtg
taggtcgttcgctccaagctgggctgtgtgcacgaaccccccgttcagcccgaccgctgcgccttatc
cggtaactatcgtcttgagtccaacccggtaagacacgacttatcgccactggcagcagccactggta
acaggattagcagagcgaggtatgtaggcggtgctacagagttcttgaagtggtggcctaactacggc
tacactagaagaacagtatttggtatctgcgctctgctgaagccagttaccttcggaaaaagagttgg
tagctcttgatccggcaaacaaaccaccgctggtagcggtttttttgtttgcaagcagcagattacgc
gcagaaaaaaaggatctcaagaagatcctttgatcttttctacggggtctgacgctcagtggaacgaa
aactcacgttaagggattttggtcatgagattatcaaaaaggatcttcacctagatccttttaaatta
aaaatgaagttttaaatcaatctaaagtatatatgagtaaacttggtctgacagttaccaatgcttaa
tcagtgaggcacctatctcagcgatctgtctatttcgttcatccatagttgcctgactccccgtcgtg
tagataactacgatacgggagggcttaccatctggccccagtgctgcaatgataccgcgagacccacg
ctcaccggctccagatttatcagcaataaaccagccagccggaagggccgagcgcagaagtggtcctg
caactttatccgcctccatccagtctattaattgttgccgggaagctagagtaagtagttcgccagtt
aatagtttgcgcaacgttgttgccattgctacaggcatcgtggtgtcacgctcgtcgtttggtatggc
ttcattcagctccggttcccaacgatcaaggcgagttacatgatcccccatgttgtgcaaaaaagcgg
ttagctccttcggtcctccgatcgttgtcagaagtaagttggccgcagtgttatcactcatggttatg
gcagcactgcataattctcttactgtcatgccatccgtaagatgcttttctgtgactggtgagtactc
aaccaagtcattctgagaatagtgtatgcggcgaccgagttgctcttgcccggcgtcaatacgggata
ataccgcgccacatagcagaactttaaaagtgctcatcattggaaaacgttcttcggggcgaaaactc
tcaaggatcttaccgctgttgagatccagttcgatgtaacccactcgtgcacccaactgatcttcagc
atcttttactttcaccagcgtttctgggtgagcaaaaacaggaaggcaaaatgccgcaaaaaagggaa
taagggcgacacggaaatgttgaatactcatactcttcctttttcaatattattgaagcatttatcag
ggttattgtctcatgagcggatacatatttgaatgtatttagaaaaataaacaaataggggttccgcg
cacatttccccgaaaagtgccacctgacgtc
pMD122_pcDNA3_SARS-CoV-2_spike_mut_v2
SEQ ID NO: 99
gacggatcgggagatctcccgatcccctatggtgcactctcagtacaatctgctctgatgccgcatag
ttaagccagtatctgctccctgcttgtgtgttggaggtcgctgagtagtgcgcgagcaaaatttaagc
tacaacaaggcaaggcttgaccgacaattgcatgaagaatctgcttagggttaggcgttttgcgctgc
ttcgcgatgtacgggccagatatacgcgttgacattgattattgactagttattaatagtaatcaatt
acggggtcattagttcatagcccatatatggagttccgcgttacataacttacggtaaatggcccgcc
tggctgaccgcccaacgacccccgcccattgacgtcaataatgacgtatgttcccatagtaacgccaa
tagggactttccattgacgtcaatgggtggagtatttacggtaaactgcccacttggcagtacatcaa
gtgtatcatatgccaagtacgccccctattgacgtcaatgacggtaaatggcccgcctggcattatgc
ccagtacatgaccttatgggactttcctacttggcagtacatctacgtattagtcatcgctattacca
tggtgatgcggttttggcagtacatcaatgggcgtggatagcggtttgactcacggggatttccaagt
ctccaccccattgacgtcaatgggagtttgttttggcaccaaaatcaacgggactttccaaaatgtcg
taacaactccgccccattgacgcaaatgggcggtaggcgtgtacggtgggaggtctatataagcagag
ctctctggctaactagagaacccactgcttactggcttatcgaaattaatacgactcactatagggag
acccaagctggATGTTTGTGTTCCTGGTGCTGCTGCCACTGGTGTCCAGCCAGTGTGTGAACCTGACC
ACCAGGACCCAACTTCCTCCTGCCTACACCAACTCCTTCACCAGGGGAGTCTACTACCCTGACAAGGT
GTTCAGGTCCTCTGTGCTGCACAGCACCCAGGACCTGTTCCTGCCATTCTTCAGCAATGTGACCTGGT
TCCATGCCATCCATGTGTCTGGCACCAATGGCACCAAGAGGTTTGACAACCCTGTGCTGCCATTCAAT
GATGGAGTCTACTTTGCCAGCACAGAGAAGAGCAACATCATCAGGGGCTGGATTTTTGGCACCACCCT
GGACAGCAAGACCCAGTCCCTGCTGATTGTGAACAATGCCACCAATGTGGTGATTAAGGTGTGTGAGT
TCCAGTTCTGTAATGACCCATTCCTGGGAGTCTACTACCACAAGAACAACAAGTCCTGGATGGAGTCT
GAGTTCAGGGTCTACTCCTCTGCCAACAACTGTACCTTTGAATATGTGAGCCAACCATTCCTGATGGA
CTTGGAGGGCAAGCAGGGCAACTTCAAGAACCTGAGGGAGTTTGTGTTCAAGAACATTGATGGCTACT
TCAAGATTTACAGCAAACACACACCAATCAACCTGGTGAGGGACCTGCCACAGGGCTTCTCTGCCTTG
GAACCACTGGTGGACCTGCCAATTGGCATCAACATCACCAGGTTCCAGACCCTGCTGGCTCTGCACAG
GTCCTACCTGACACCTGGAGACTCCTCCTCTGGCTGGACAGCAGGAGCAGCAGCCTACTATGTGGGCT
ACCTCCAACCAAGGACCTTCCTGCTGAAATACAATGAGAATGGCACCATCACAGATGCTGTGGACTGT
GCCCTGGACCCACTGTCTGAGACCAAGTGTACCCTGAAATCCTTCACAGTGGAGAAGGGCATCTACCA
GACCAGCAACTTCAGGGTCCAACCAACAGAGAGCATTGTGAGGTTTCCAAACATCACCAACCTGTGTC
CATTTGGAGAGGTGTTCAATGCCACCAGGTTTGCCTCTGTCTATGCCTGGAACAGGAAGAGGATTAGC
AACTGTGTGGCTGACTACTCTGTGCTCTACAACTCTGCCTCCTTCAGCACCTTCAAGTGTTATGGAGT
GAGCCCAACCAAACTGAATGACCTGTGTTTCACCAATGTCTATGCTGACTCCTTTGTGATTAGGGGAG
ATGAGGTGAGACAGATTGCCCCTGGACAAACAGGCgccATTGCTGACTACAACTACAAACTGCCTGAT
GACTTCACAGGCTGTGTGATTGCCTGGAACAGCAACAACCTGGACAGCAAGGTGGGAGGCAACTACAA
CTACCTCTACAGAgccgctAGGAAGAGCAACCTGAAACCATTTGAGAGGGACATCAGCACAGAGATTg
ccCAGGCTGGCAGCACACCATGTAATGGAGTGGAGGGCTTCAACTGTTACTTTCCACTCgccTCCTAT
GGCTTCCAACCAACCAATGGAGTGGGCTACCAACCATACAGGGTGGTGGTGCTGTCCTTTGAACTGCT
CCATGCCCCTGCCACAGTGTGTGGACCAAAGAAGAGCACCAACCTGGTGAAGAACAAGTGTGTGAACT
TCAACgccAATGGACTGACAGGCACAGGAGTGCTGACAGAGAGCAACAAGAAGTTCCTGCCATTCCAA
CAGTTTGGCAGGGACATTGCTGACACCACAGATGCTGTGAGGGACCCACAGACCTTGGAGATTCTGGA
CATCACACCATGTTCCTTTGGAGGAGTGTCTGTGATTACACCTGGCACCAACACCAGCAACCAGGTGG
CTGTGCTCTACCAGGATGTGAACTGTACTGAGGTGCCTGTGGCTATCCATGCTGACCAACTTACACCA
ACCTGGAGGGTCTACAGCACAGGCAGCAATGTGTTCCAGACCAGGGCTGGCTGTCTGATTGGAGCAGA
GCATGTGAACAACTCCTATGAGTGTGACATCCCAATTGGAGCAGGCATCTGTGCCTCCTACCAGACCC
AGACCAACAGCCCAAGGAGGGCAAGGTCTGTGGCAAGCCAGAGCATCATTGCCTACACAATGAGTCTG
GGAGCAGAGAACTCTGTGGCTTACAGCAACAACAGCATTGCCATCCCAACCAACTTCACCATCTCTGT
GACCACAGAGATTCTGCCTGTGAGTATGACCAAGACCTCTGTGGACTGTACAATGTATATCTGTGGAG
ACAGCACAGAGTGTAGCAACCTGCTGCTCCAATATGGCTCCTTCTGTACCCAACTTAACAGGGCTCTG
ACAGGCATTGCTGTGGAACAGGACAAGAACACCCAGGAGGTGTTTGCCCAGGTGAAGCAGATTTACAA
GACACCTCCAATCAAGGACTTTGGAGGCTTCAACTTCAGCCAGATTCTGCCTGACCCAAGCAAGCCAA
GCAAGAGGTCCTTCATTGAGGACCTGCTGTTCAACAAGGTGACCCTGGCTGATGCTGGCTTCATCAAG
CAATATGGAGACTGTCTGGGAGACATTGCTGCCAGGGACCTGATTTGTGCCCAGAAGTTCAATGGACT
GACAGTGCTGCCTCCACTGCTGACAGATGAGATGATTGCCCAATACACCTCTGCCCTGCTGGCTGGCA
CCATCACCTCTGGCTGGACCTTTGGAGCAGGAGCAGCCCTCCAAATCCCATTTGCTATGCAGATGGCT
TACAGGTTCAATGGCATTGGAGTGACCCAGAATGTGCTCTATGAGAACCAGAAACTGATTGCCAACCA
GTTCAACTCTGCCATTGGCAAGATTCAGGACTCCCTGTCCAGCACAGCCTCTGCCCTGGGCAAACTCC
AAGATGTGGTGAACCAGAATGCCCAGGCTCTGAACACCCTGGTGAAGCAACTTTCCAGCAACTTTGGA
GCCATCTCCTCTGTGCTGAATGACATCCTGAGCAGACTGGACAAGGTGGAGGCTGAGGTCCAGATTGA
CAGACTGATTACAGGCAGACTCCAATCCCTCCAAACCTATGTGACCCAACAACTTATCAGGGCTGCTG
AGATTAGGGCATCTGCCAACCTGGCTGCCACCAAGATGAGTGAGTGTGTGCTGGGACAAAGCAAGAGG
GTGGACTTCTGTGGCAAGGGCTACCACCTGATGAGTTTTCCACAGTCTGCCCCTCATGGAGTGGTGTT
CCTGCATGTGACCTATGTGCCTGCCCAGGAGAAGAACTTCACCACAGCCCCTGCCATCTGCCATGATG
GCAAGGCTCACTTTCCAAGGGAGGGAGTGTTTGTGAGCAATGGCACCCACTGGTTTGTGACCCAGAGG
AACTTCTATGAACCACAGATTATCACCACAGACAACACCTTTGTGTCTGGCAACTGTGATGTGGTGAT
TGGCATTGTGAACAACACAGTCTATGACCCACTCCAACCTGAACTGGACTCCTTCAAGGAGGAACTGG
ACAAATACTTCAAGAACCACACCAGCCCTGATGTGGACCTGGGAGACATCTCTGGCATCAATGCCTCT
GTGGTGAACATCCAGAAGGAGATTGACAGACTGAATGAGGTGGCTAAGAACCTGAATGAGTCCCTGAT
TGACCTCCAAGAACTGGGCAAATATGAACAATACATCAAGTGGCCATGGTACATCTGGCTGGGCTTCA
TTGCTGGACTGATTGCCATTGTGATGGTGACCATAATGCTGTGTTGTATGACCTCCTGTTGTTCCTGT
CTGAAAGGCTGTTGTTCCTGTGGCTCCTGTTGTAAGTTTGATGAGGATGACTCTGAACCTGTGCTGAA
AGGAGTGAAACTGCACTACACCTGAgtttaaacccgctgatcagcctcgactgtgccttctagttgcc
agccatctgttgtttgcccctcccccgtgccttccttgaccctggaaggtgccactcccactgtcctt
tcctaataaaatgaggaaattgcatcgcattgtctgagtaggtgtcattctattctggggggtggggt
ggggcaggacagcaagggggaggattgggaagacaatagcaggcatgctggggatgcggtgggctcta
tggcttctgaggcggaaagaaccagctggggctctagggggtatccccacgcgccctgtagcggcgca
ttaagcgcggcgggtgtggtggttacgcgcagcgtgaccgctacacttgccagcgccctagcgcccgc
tcctttcgctttcttcccttcctttctcgccacgttcgccggctttccccgtcaagctctaaatcggg
ggctccctttagggttccgatttagtgctttacggcacctcgaccccaaaaaacttgattagggtgat
ggttcacgtagtgggccatcgccctgatagacggtttttcgccctttgacgttggagtccacgttctt
taatagtggactcttgttccaaactggaacaacactcaaccctatctcggtctattcttttgatttat
aagggattttgccgatttcggcctattggttaaaaaatgagctgatttaacaaaaatttaacgcgaat
taattctgtggaatgtgtgtcagttagggtgtggaaagtccccaggctccccagcaggcagaagtatg
caaagcatgcatctcaattagtcagcaaccaggtgtggaaagtccccaggctccccagcaggcagaag
tatgcaaagcatgcatctcaattagtcagcaaccatagtcccgcccctaactccgcccatcccgcccc
taactccgcccagttccgcccattctccgccccatggctgactaattttttttatttatgcagaggcc
gaggccgcctctgcctctgagctattccagaagtagtgaggaggcttttttggaggcctaggcttttg
caaaaagctcccgggagcttgtatatccattttcggatctgatcaagagacaggatgaggatcgtttc
gcatgattgaacaagatggattgcacgcaggttctccggccgcttgggtggagaggctattcggctat
gactgggcacaacagacaatcggctgctctgatgccgccgtgttccggctgtcagcgcaggggcgccc
ggttctttttgtcaagaccgacctgtccggtgccctgaatgaactgcaggacgaggcagcgcggctat
cgtggctggccacgacgggcgttccttgcgcagctgtgctcgacgttgtcactgaagcgggaagggac
tggctgctattgggcgaagtgccggggcaggatctcctgtcatctcaccttgctcctgccgagaaagt
atccatcatggctgatgcaatgcggcggctgcatacgcttgatccggctacctgcccattcgaccacc
aagcgaaacatcgcatcgagcgagcacgtactcggatggaagccggtcttgtcgatcaggatgatctg
gacgaagagcatcaggggctcgcgccagccgaactgttcgccaggctcaaggcgcgcatgcccgacgg
cgaggatctcgtcgtgacccatggcgatgcctgcttgccgaatatcatggtggaaaatggccgctttt
ctggattcatcgactgtggccggctgggtgtggcggaccgctatcaggacatagcgttggctacccgt
gatattgctgaagagcttggcggcgaatgggctgaccgcttcctcgtgctttacggtatcgccgctcc
cgattcgcagcgcatcgccttctatcgccttcttgacgagttcttctgagcgggactctggggttcga
aatgaccgaccaagcgacgcccaacctgccatcacgagatttcgattccaccgccgccttctatgaaa
ggttgggcttcggaatcgttttccgggacgccggctggatgatcctccagcgcggggatctcatgctg
gagttcttcgcccaccccaacttgtttattgcagcttataatggttacaaataaagcaatagcatcac
aaatttcacaaataaagcatttttttcactgcattctagttgtggtttgtccaaactcatcaatgtat
cttatcatgtctgtataccgtcgacctctagctagagcttggcgtaatcatggtcatagctgtttcct
gtgtgaaattgttatccgctcacaattccacacaacatacgagccggaagcataaagtgtaaagcctg
gggtgcctaatgagtgagctaactcacattaattgcgttgcgctcactgcccgctttccagtcgggaa
acctgtcgtgccagctgcattaatgaatcggccaacgcgcggggagaggcggtttgcgtattgggcgc
tcttccgcttcctcgctcactgactcgctgcgctcggtcgttcggctgcggcgagcggtatcagctca
ctcaaaggcggtaatacggttatccacagaatcaggggataacgcaggaaagaacatgtgagcaaaag
gccagcaaaaggccaggaaccgtaaaaaggccgcgttgctggcgtttttccataggctccgcccccct
gacgagcatcacaaaaatcgacgctcaagtcagaggtggcgaaacccgacaggactataaagatacca
ggcgtttccccctggaagctccctcgtgcgctctcctgttccgaccctgccgcttaccggatacctgt
ccgcctttctcccttcgggaagcgtggcgctttctcatagctcacgctgtaggtatctcagttcggtg
taggtcgttcgctccaagctgggctgtgtgcacgaaccccccgttcagcccgaccgctgcgccttatc
cggtaactatcgtcttgagtccaacccggtaagacacgacttatcgccactggcagcagccactggta
acaggattagcagagcgaggtatgtaggcggtgctacagagttcttgaagtggtggcctaactacggc
tacactagaagaacagtatttggtatctgcgctctgctgaagccagttaccttcggaaaaagagttgg
tagctcttgatccggcaaacaaaccaccgctggtagcggtttttttgtttgcaagcagcagattacgc
gcagaaaaaaaggatctcaagaagatcctttgatcttttctacggggtctgacgctcagtggaacgaa
aactcacgttaagggattttggtcatgagattatcaaaaaggatcttcacctagatccttttaaatta
aaaatgaagttttaaatcaatctaaagtatatatgagtaaacttggtctgacagttaccaatgcttaa
tcagtgaggcacctatctcagcgatctgtctatttcgttcatccatagttgcctgactccccgtcgtg
tagataactacgatacgggagggcttaccatctggccccagtgctgcaatgataccgcgagacccacg
ctcaccggctccagatttatcagcaataaaccagccagccggaagggccgagcgcagaagtggtcctg
caactttatccgcctccatccagtctattaattgttgccgggaagctagagtaagtagttcgccagtt
aatagtttgcgcaacgttgttgccattgctacaggcatcgtggtgtcacgctcgtcgtttggtatggc
ttcattcagctccggttcccaacgatcaaggcgagttacatgatcccccatgttgtgcaaaaaagcgg
ttagctccttcggtcctccgatcgttgtcagaagtaagttggccgcagtgttatcactcatggttatg
gcagcactgcataattctcttactgtcatgccatccgtaagatgcttttctgtgactggtgagtactc
aaccaagtcattctgagaatagtgtatgcggcgaccgagttgctcttgcccggcgtcaatacgggata
ataccgcgccacatagcagaactttaaaagtgctcatcattggaaaacgttcttcggggcgaaaactc
tcaaggatcttaccgctgttgagatccagttcgatgtaacccactcgtgcacccaactgatcttcagc
atcttttactttcaccagcgtttctgggtgagcaaaaacaggaaggcaaaatgccgcaaaaaagggaa
taagggcgacacggaaatgttgaatactcatactcttcctttttcaatattattgaagcatttatcag
ggttattgtctcatgagcggatacatatttgaatgtatttagaaaaataaacaaataggggttccgcg
cacatttccccgaaaagtgccacctgacgtc
pMD123_pcDNA3_SARS-CoV-2_spike_mut_v3
SEQ ID NO: 100
gacggatcgggagatctcccgatcccctatggtgcactctcagtacaatctgctctgatgccgcatag
ttaagccagtatctgctccctgcttgtgtgttggaggtcgctgagtagtgcgcgagcaaaatttaagc
tacaacaaggcaaggcttgaccgacaattgcatgaagaatctgcttagggttaggcgttttgcgctgc
ttcgcgatgtacgggccagatatacgcgttgacattgattattgactagttattaatagtaatcaatt
acggggtcattagttcatagcccatatatggagttccgcgttacataacttacggtaaatggcccgcc
tggctgaccgcccaacgacccccgcccattgacgtcaataatgacgtatgttcccatagtaacgccaa
tagggactttccattgacgtcaatgggtggagtatttacggtaaactgcccacttggcagtacatcaa
gtgtatcatatgccaagtacgccccctattgacgtcaatgacggtaaatggcccgcctggcattatgc
ccagtacatgaccttatgggactttcctacttggcagtacatctacgtattagtcatcgctattacca
tggtgatgcggttttggcagtacatcaatgggcgtggatagcggtttgactcacggggatttccaagt
ctccaccccattgacgtcaatgggagtttgttttggcaccaaaatcaacgggactttccaaaatgtcg
taacaactccgccccattgacgcaaatgggcggtaggcgtgtacggtgggaggtctatataagcagag
ctctctggctaactagagaacccactgcttactggcttatcgaaattaatacgactcactatagggag
acccaagctggATGTTTGTGTTCCTGGTGCTGCTGCCACTGGTGTCCAGCCAGTGTGTGAACCTGACC
ACCAGGACCCAACTTCCTCCTGCCTACACCAACTCCTTCACCAGGGGAGTCTACTACCCTGACAAGGT
GTTCAGGTCCTCTGTGCTGCACAGCACCCAGGACCTGTTCCTGCCATTCTTCAGCAATGTGACCTGGT
TCCATGCCATCCATGTGTCTGGCACCAATGGCACCAAGAGGTTTGACAACCCTGTGCTGCCATTCAAT
GATGGAGTCTACTTTGCCAGCACAGAGAAGAGCAACATCATCAGGGGCTGGATTTTTGGCACCACCCT
GGACAGCAAGACCCAGTCCCTGCTGATTGTGAACAATGCCACCAATGTGGTGATTAAGGTGTGTGAGT
TCCAGTTCTGTAATGACCCATTCCTGGGAGTCTACTACCACAAGAACAACAAGTCCTGGATGGAGTCT
GAGTTCAGGGTCTACTCCTCTGCCAACAACTGTACCTTTGAATATGTGAGCCAACCATTCCTGATGGA
CTTGGAGGGCAAGCAGGGCAACTTCAAGAACCTGAGGGAGTTTGTGTTCAAGAACATTGATGGCTACT
TCAAGATTTACAGCAAACACACACCAATCAACCTGGTGAGGGACCTGCCACAGGGCTTCTCTGCCTTG
GAACCACTGGTGGACCTGCCAATTGGCATCAACATCACCAGGTTCCAGACCCTGCTGGCTCTGCACAG
GTCCTACCTGACACCTGGAGACTCCTCCTCTGGCTGGACAGCAGGAGCAGCAGCCTACTATGTGGGCT
ACCTCCAACCAAGGACCTTCCTGCTGAAATACAATGAGAATGGCACCATCACAGATGCTGTGGACTGT
GCCCTGGACCCACTGTCTGAGACCAAGTGTACCCTGAAATCCTTCACAGTGGAGAAGGGCATCTACCA
GACCAGCAACTTCAGGGTCCAACCAACAGAGAGCATTGTGAGGTTTCCAAACATCACCAACCTGTGTC
CATTTGGAGAGGTGTTCAATGCCACCAGGTTTGCCTCTGTCTATGCCTGGAACAGGAAGAGGATTAGC
AACTGTGTGGCTGACTACTCTGTGCTCTACAACTCTGCCTCCTTCAGCACCTTCAAGTGTTATGGAGT
GAGCCCAACCAAACTGAATGACCTGTGTTTCACCAATGTCTATGCTGACTCCTTTGTGATTAGGGGAG
ATGAGGTGAGACAGATTGCCCCTGGACAAACAGGCAAGATTGCTGACTACAACTACAAACTGCCTGAT
GACTTCACAGGCTGTGTGATTGCCTGGAACAGCAACAACCTGGACAGCAAGGTGGGAGGCAACTACAA
CTACCTCTACAGACTGTTCAGGAAGAGCAACCTGAAACCATTTGAGAGGGACATCAGCACAGAGATTT
ACgctGCTGGCAGCACACCATGTAATGGAGTGGAGGGCgccgctTGTTACTTTCCACTCCAATCCTAT
GGCTTCCAACCAACCAATGGAGTGGGCTACCAACCATACAGGGTGGTGGTGCTGTCCTTTGAACTGCT
CCATGCCCCTGCCACAGTGTGTGGACCAAAGAAGAGCACCAACCTGGTGAAGAACAAGTGTGTGAACT
TCAACTTCAATGGACTGACAGGCACAGGAGTGCTGACAGAGAGCAACAAGAAGTTCCTGCCATTCCAA
CAGTTTGGCAGGGACATTGCTGACACCACAGATGCTGTGAGGGACCCACAGACCTTGGAGATTCTGGA
CATCACACCATGTTCCTTTGGAGGAGTGTCTGTGATTACACCTGGCACCAACACCAGCAACCAGGTGG
CTGTGCTCTACCAGGATGTGAACTGTACTGAGGTGCCTGTGGCTATCCATGCTGACCAACTTACACCA
ACCTGGAGGGTCTACAGCACAGGCAGCAATGTGTTCCAGACCAGGGCTGGCTGTCTGATTGGAGCAGA
GCATGTGAACAACTCCTATGAGTGTGACATCCCAATTGGAGCAGGCATCTGTGCCTCCTACCAGACCC
AGACCAACAGCCCAAGGAGGGCAAGGTCTGTGGCAAGCCAGAGCATCATTGCCTACACAATGAGTCTG
GGAGCAGAGAACTCTGTGGCTTACAGCAACAACAGCATTGCCATCCCAACCAACTTCACCATCTCTGT
GACCACAGAGATTCTGCCTGTGAGTATGACCAAGACCTCTGTGGACTGTACAATGTATATCTGTGGAG
ACAGCACAGAGTGTAGCAACCTGCTGCTCCAATATGGCTCCTTCTGTACCCAACTTAACAGGGCTCTG
ACAGGCATTGCTGTGGAACAGGACAAGAACACCCAGGAGGTGTTTGCCCAGGTGAAGCAGATTTACAA
GACACCTCCAATCAAGGACTTTGGAGGCTTCAACTTCAGCCAGATTCTGCCTGACCCAAGCAAGCCAA
GCAAGAGGTCCTTCATTGAGGACCTGCTGTTCAACAAGGTGACCCTGGCTGATGCTGGCTTCATCAAG
CAATATGGAGACTGTCTGGGAGACATTGCTGCCAGGGACCTGATTTGTGCCCAGAAGTTCAATGGACT
GACAGTGCTGCCTCCACTGCTGACAGATGAGATGATTGCCCAATACACCTCTGCCCTGCTGGCTGGCA
CCATCACCTCTGGCTGGACCTTTGGAGCAGGAGCAGCCCTCCAAATCCCATTTGCTATGCAGATGGCT
TACAGGTTCAATGGCATTGGAGTGACCCAGAATGTGCTCTATGAGAACCAGAAACTGATTGCCAACCA
GTTCAACTCTGCCATTGGCAAGATTCAGGACTCCCTGTCCAGCACAGCCTCTGCCCTGGGCAAACTCC
AAGATGTGGTGAACCAGAATGCCCAGGCTCTGAACACCCTGGTGAAGCAACTTTCCAGCAACTTTGGA
GCCATCTCCTCTGTGCTGAATGACATCCTGAGCAGACTGGACAAGGTGGAGGCTGAGGTCCAGATTGA
CAGACTGATTACAGGCAGACTCCAATCCCTCCAAACCTATGTGACCCAACAACTTATCAGGGCTGCTG
AGATTAGGGCATCTGCCAACCTGGCTGCCACCAAGATGAGTGAGTGTGTGCTGGGACAAAGCAAGAGG
GTGGACTTCTGTGGCAAGGGCTACCACCTGATGAGTTTTCCACAGTCTGCCCCTCATGGAGTGGTGTT
CCTGCATGTGACCTATGTGCCTGCCCAGGAGAAGAACTTCACCACAGCCCCTGCCATCTGCCATGATG
GCAAGGCTCACTTTCCAAGGGAGGGAGTGTTTGTGAGCAATGGCACCCACTGGTTTGTGACCCAGAGG
AACTTCTATGAACCACAGATTATCACCACAGACAACACCTTTGTGTCTGGCAACTGTGATGTGGTGAT
TGGCATTGTGAACAACACAGTCTATGACCCACTCCAACCTGAACTGGACTCCTTCAAGGAGGAACTGG
ACAAATACTTCAAGAACCACACCAGCCCTGATGTGGACCTGGGAGACATCTCTGGCATCAATGCCTCT
GTGGTGAACATCCAGAAGGAGATTGACAGACTGAATGAGGTGGCTAAGAACCTGAATGAGTCCCTGAT
TGACCTCCAAGAACTGGGCAAATATGAACAATACATCAAGTGGCCATGGTACATCTGGCTGGGCTTCA
TTGCTGGACTGATTGCCATTGTGATGGTGACCATAATGCTGTGTTGTATGACCTCCTGTTGTTCCTGT
CTGAAAGGCTGTTGTTCCTGTGGCTCCTGTTGTAAGTTTGATGAGGATGACTCTGAACCTGTGCTGAA
AGGAGTGAAACTGCACTACACCTGAgtttaaacccgctgatcagcctcgactgtgccttctagttgcc
agccatctgttgtttgcccctcccccgtgccttccttgaccctggaaggtgccactcccactgtcctt
tcctaataaaatgaggaaattgcatcgcattgtctgagtaggtgtcattctattctggggggtggggt
ggggcaggacagcaagggggaggattgggaagacaatagcaggcatgctggggatgcggtgggctcta
tggcttctgaggcggaaagaaccagctggggctctagggggtatccccacgcgccctgtagcggcgca
ttaagcgcggcgggtgtggtggttacgcgcagcgtgaccgctacacttgccagcgccctagcgcccgc
tcctttcgctttcttcccttcctttctcgccacgttcgccggctttccccgtcaagctctaaatcggg
ggctccctttagggttccgatttagtgctttacggcacctcgaccccaaaaaacttgattagggtgat
ggttcacgtagtgggccatcgccctgatagacggtttttcgccctttgacgttggagtccacgttctt
taatagtggactcttgttccaaactggaacaacactcaaccctatctcggtctattcttttgatttat
aagggattttgccgatttcggcctattggttaaaaaatgagctgatttaacaaaaatttaacgcgaat
taattctgtggaatgtgtgtcagttagggtgtggaaagtccccaggctccccagcaggcagaagtatg
caaagcatgcatctcaattagtcagcaaccaggtgtggaaagtccccaggctccccagcaggcagaag
tatgcaaagcatgcatctcaattagtcagcaaccatagtcccgcccctaactccgcccatcccgcccc
taactccgcccagttccgcccattctccgccccatggctgactaattttttttatttatgcagaggcc
gaggccgcctctgcctctgagctattccagaagtagtgaggaggcttttttggaggcctaggcttttg
caaaaagctcccgggagcttgtatatccattttcggatctgatcaagagacaggatgaggatcgtttc
gcatgattgaacaagatggattgcacgcaggttctccggccgcttgggtggagaggctattcggctat
gactgggcacaacagacaatcggctgctctgatgccgccgtgttccggctgtcagcgcaggggcgccc
ggttctttttgtcaagaccgacctgtccggtgccctgaatgaactgcaggacgaggcagcgcggctat
cgtggctggccacgacgggcgttccttgcgcagctgtgctcgacgttgtcactgaagcgggaagggac
tggctgctattgggcgaagtgccggggcaggatctcctgtcatctcaccttgctcctgccgagaaagt
atccatcatggctgatgcaatgcggcggctgcatacgcttgatccggctacctgcccattcgaccacc
aagcgaaacatcgcatcgagcgagcacgtactcggatggaagccggtcttgtcgatcaggatgatctg
gacgaagagcatcaggggctcgcgccagccgaactgttcgccaggctcaaggcgcgcatgcccgacgg
cgaggatctcgtcgtgacccatggcgatgcctgcttgccgaatatcatggtggaaaatggccgctttt
ctggattcatcgactgtggccggctgggtgtggcggaccgctatcaggacatagcgttggctacccgt
gatattgctgaagagcttggcggcgaatgggctgaccgcttcctcgtgctttacggtatcgccgctcc
cgattcgcagcgcatcgccttctatcgccttcttgacgagttcttctgagcgggactctggggttcga
aatgaccgaccaagcgacgcccaacctgccatcacgagatttcgattccaccgccgccttctatgaaa
ggttgggcttcggaatcgttttccgggacgccggctggatgatcctccagcgcggggatctcatgctg
gagttcttcgcccaccccaacttgtttattgcagcttataatggttacaaataaagcaatagcatcac
aaatttcacaaataaagcatttttttcactgcattctagttgtggtttgtccaaactcatcaatgtat
cttatcatgtctgtataccgtcgacctctagctagagcttggcgtaatcatggtcatagctgtttcct
gtgtgaaattgttatccgctcacaattccacacaacatacgagccggaagcataaagtgtaaagcctg
gggtgcctaatgagtgagctaactcacattaattgcgttgcgctcactgcccgctttccagtcgggaa
acctgtcgtgccagctgcattaatgaatcggccaacgcgcggggagaggcggtttgcgtattgggcgc
tcttccgcttcctcgctcactgactcgctgcgctcggtcgttcggctgcggcgagcggtatcagctca
ctcaaaggcggtaatacggttatccacagaatcaggggataacgcaggaaagaacatgtgagcaaaag
gccagcaaaaggccaggaaccgtaaaaaggccgcgttgctggcgtttttccataggctccgcccccct
gacgagcatcacaaaaatcgacgctcaagtcagaggtggcgaaacccgacaggactataaagatacca
ggcgtttccccctggaagctccctcgtgcgctctcctgttccgaccctgccgcttaccggatacctgt
ccgcctttctcccttcgggaagcgtggcgctttctcatagctcacgctgtaggtatctcagttcggtg
taggtcgttcgctccaagctgggctgtgtgcacgaaccccccgttcagcccgaccgctgcgccttatc
cggtaactatcgtcttgagtccaacccggtaagacacgacttatcgccactggcagcagccactggta
acaggattagcagagcgaggtatgtaggcggtgctacagagttcttgaagtggtggcctaactacggc
tacactagaagaacagtatttggtatctgcgctctgctgaagccagttaccttcggaaaaagagttgg
tagctcttgatccggcaaacaaaccaccgctggtagcggttttttttttgcaagcagcagattacgc
gcagaaaaaaaggatctcaagaagatcctttgatcttttctacggggtctgacgctcagtggaacgaa
aactcacgttaagggattttggtcatgagattatcaaaaaggatcttcacctagatccttttaaatta
aaaatgaagttttaaatcaatctaaagtatatatgagtaaacttggtctgacagttaccaatgcttaa
tcagtgaggcacctatctcagcgatctgtctatttcgttcatccatagttgcctgactccccgtcgtg
tagataactacgatacgggagggcttaccatctggccccagtgctgcaatgataccgcgagacccacg
ctcaccggctccagatttatcagcaataaaccagccagccggaagggccgagcgcagaagtggtcctg
caactttatccgcctccatccagtctattaattgttgccgggaagctagagtaagtagttcgccagtt
aatagtttgcgcaacgttgttgccattgctacaggcatcgtggtgtcacgctcgtcgtttggtatggc
ttcattcagctccggttcccaacgatcaaggcgagttacatgatcccccatgttgtgcaaaaaagcgg
ttagctccttcggtcctccgatcgttgtcagaagtaagttggccgcagtgttatcactcatggttatg
gcagcactgcataattctcttactgtcatgccatccgtaagatgcttttctgtgactggtgagtactc
aaccaagtcattctgagaatagtgtatgcggcgaccgagttgctcttgcccggcgtcaatacgggata
ataccgcgccacatagcagaactttaaaagtgctcatcattggaaaacgttcttcggggcgaaaactc
tcaaggatcttaccgctgttgagatccagttcgatgtaacccactcgtgcacccaactgatcttcagc
atcttttactttcaccagcgtttctgggtgagcaaaaacaggaaggcaaaatgccgcaaaaaagggaa
taagggcgacacggaaatgttgaatactcatactcttcctttttcaatattattgaagcatttatcag
ggttattgtctcatgagcggatacatatttgaatgtatttagaaaaataaacaaataggggttccgcg
cacatttccccgaaaagtgccacctgacgtc
pMD124_pcDNA3_SARS-CoV-2_spike_mut_v4
SEQ ID NO: 101
gacggatcgggagatctcccgatcccctatggtgcactctcagtacaatctgctctgatgccgcatag
ttaagccagtatctgctccctgcttgtgtgttggaggtcgctgagtagtgcgcgagcaaaatttaagc
tacaacaaggcaaggcttgaccgacaattgcatgaagaatctgcttagggttaggcgttttgcgctgc
ttcgcgatgtacgggccagatatacgcgttgacattgattattgactagttattaatagtaatcaatt
acggggtcattagttcatagcccatatatggagttccgcgttacataacttacggtaaatggcccgcc
tggctgaccgcccaacgacccccgcccattgacgtcaataatgacgtatgttcccatagtaacgccaa
tagggactttccattgacgtcaatgggtggagtatttacggtaaactgcccacttggcagtacatcaa
gtgtatcatatgccaagtacgccccctattgacgtcaatgacggtaaatggcccgcctggcattatgc
ccagtacatgaccttatgggactttcctacttggcagtacatctacgtattagtcatcgctattacca
tggtgatgcggttttggcagtacatcaatgggcgtggatagcggtttgactcacggggatttccaagt
ctccaccccattgacgtcaatgggagtttgttttggcaccaaaatcaacgggactttccaaaatgtcg
taacaactccgccccattgacgcaaatgggcggtaggcgtgtacggtgggaggtctatataagcagag
ctctctggctaactagagaacccactgcttactggcttatcgaaattaatacgactcactatagggag
acccaagctggATGTTTGTGTTCCTGGTGCTGCTGCCACTGGTGTCCAGCCAGTGTGTGAACCTGACC
ACCAGGACCCAACTTCCTCCTGCCTACACCAACTCCTTCACCAGGGGAGTCTACTACCCTGACAAGGT
GTTCAGGTCCTCTGTGCTGCACAGCACCCAGGACCTGTTCCTGCCATTCTTCAGCAATGTGACCTGGT
TCCATGCCATCCATGTGTCTGGCACCAATGGCACCAAGAGGTTTGACAACCCTGTGCTGCCATTCAAT
GATGGAGTCTACTTTGCCAGCACAGAGAAGAGCAACATCATCAGGGGCTGGATTTTTGGCACCACCCT
GGACAGCAAGACCCAGTCCCTGCTGATTGTGAACAATGCCACCAATGTGGTGATTAAGGTGTGTGAGT
TCCAGTTCTGTAATGACCCATTCCTGGGAGTCTACTACCACAAGAACAACAAGTCCTGGATGGAGTCT
GAGTTCAGGGTCTACTCCTCTGCCAACAACTGTACCTTTGAATATGTGAGCCAACCATTCCTGATGGA
CTTGGAGGGCAAGCAGGGCAACTTCAAGAACCTGAGGGAGTTTGTGTTCAAGAACATTGATGGCTACT
TCAAGATTTACAGCAAACACACACCAATCAACCTGGTGAGGGACCTGCCACAGGGCTTCTCTGCCTTG
GAACCACTGGTGGACCTGCCAATTGGCATCAACATCACCAGGTTCCAGACCCTGCTGGCTCTGCACAG
GTCCTACCTGACACCTGGAGACTCCTCCTCTGGCTGGACAGCAGGAGCAGCAGCCTACTATGTGGGCT
ACCTCCAACCAAGGACCTTCCTGCTGAAATACAATGAGAATGGCACCATCACAGATGCTGTGGACTGT
GCCCTGGACCCACTGTCTGAGACCAAGTGTACCCTGAAATCCTTCACAGTGGAGAAGGGCATCTACCA
GACCAGCAACTTCAGGGTCCAACCAACAGAGAGCATTGTGAGGTTTCCAAACATCACCAACCTGTGTC
CATTTGGAGAGGTGTTCAATGCCACCAGGTTTGCCTCTGTCTATGCCTGGAACAGGAAGAGGATTAGC
AACTGTGTGGCTGACTACTCTGTGCTCTACAACTCTGCCTCCTTCAGCACCTTCAAGTGTTATGGAGT
GAGCCCAACCAAACTGAATGACCTGTGTTTCACCAATGTCTATGCTGACTCCTTTGTGATTAGGGGAG
ATGAGGTGAGACAGATTGCCCCTGGACAAACAGGCgccATTGCTGACTACAACTACAAACTGCCTGAT
GACTTCACAGGCTGTGTGATTGCCTGGAACAGCgccAACCTGGACAGCAAGGTGGGAGGCAACgccAA
CTACCTCTACAGAgccgctAGGAAGAGCAACCTGAAACCATTTGAGAGGGACATCAGCACAGAGATTg
ccgctGCTGGCAGCACACCATGTAATGGAGTGGAGGGCgccgctTGTTACTTTCCACTCgccTCCTAT
GGCTTCgccCCAgctgccGGAGTGGGCTACCAACCATACAGGGTGGTGGTGCTGTCCTTTGAACTGCT
CCATGCCCCTGCCACAGTGTGTGGACCAAAGAAGAGCACCAACCTGGTGAAGAACAAGTGTGTGAACT
TCAACgccAATGGACTGACAGGCACAGGAGTGCTGACAGAGAGCAACAAGAAGTTCCTGCCATTCCAA
CAGTTTGGCAGGGACATTGCTGACACCACAGATGCTGTGAGGGACCCACAGACCTTGGAGATTCTGGA
CATCACACCATGTTCCTTTGGAGGAGTGTCTGTGATTACACCTGGCACCAACACCAGCAACCAGGTGG
CTGTGCTCTACCAGGATGTGAACTGTACTGAGGTGCCTGTGGCTATCCATGCTGACCAACTTACACCA
ACCTGGAGGGTCTACAGCACAGGCAGCAATGTGTTCCAGACCAGGGCTGGCTGTCTGATTGGAGCAGA
GCATGTGAACAACTCCTATGAGTGTGACATCCCAATTGGAGCAGGCATCTGTGCCTCCTACCAGACCC
AGACCAACAGCCCAAGGAGGGCAAGGTCTGTGGCAAGCCAGAGCATCATTGCCTACACAATGAGTCTG
GGAGCAGAGAACTCTGTGGCTTACAGCAACAACAGCATTGCCATCCCAACCAACTTCACCATCTCTGT
GACCACAGAGATTCTGCCTGTGAGTATGACCAAGACCTCTGTGGACTGTACAATGTATATCTGTGGAG
ACAGCACAGAGTGTAGCAACCTGCTGCTCCAATATGGCTCCTTCTGTACCCAACTTAACAGGGCTCTG
ACAGGCATTGCTGTGGAACAGGACAAGAACACCCAGGAGGTGTTTGCCCAGGTGAAGCAGATTTACAA
GACACCTCCAATCAAGGACTTTGGAGGCTTCAACTTCAGCCAGATTCTGCCTGACCCAAGCAAGCCAA
GCAAGAGGTCCTTCATTGAGGACCTGCTGTTCAACAAGGTGACCCTGGCTGATGCTGGCTTCATCAAG
CAATATGGAGACTGTCTGGGAGACATTGCTGCCAGGGACCTGATTTGTGCCCAGAAGTTCAATGGACT
GACAGTGCTGCCTCCACTGCTGACAGATGAGATGATTGCCCAATACACCTCTGCCCTGCTGGCTGGCA
CCATCACCTCTGGCTGGACCTTTGGAGCAGGAGCAGCCCTCCAAATCCCATTTGCTATGCAGATGGCT
TACAGGTTCAATGGCATTGGAGTGACCCAGAATGTGCTCTATGAGAACCAGAAACTGATTGCCAACCA
GTTCAACTCTGCCATTGGCAAGATTCAGGACTCCCTGTCCAGCACAGCCTCTGCCCTGGGCAAACTCC
AAGATGTGGTGAACCAGAATGCCCAGGCTCTGAACACCCTGGTGAAGCAACTTTCCAGCAACTTTGGA
GCCATCTCCTCTGTGCTGAATGACATCCTGAGCAGACTGGACAAGGTGGAGGCTGAGGTCCAGATTGA
CAGACTGATTACAGGCAGACTCCAATCCCTCCAAACCTATGTGACCCAACAACTTATCAGGGCTGCTG
AGATTAGGGCATCTGCCAACCTGGCTGCCACCAAGATGAGTGAGTGTGTGCTGGGACAAAGCAAGAGG
GTGGACTTCTGTGGCAAGGGCTACCACCTGATGAGTTTTCCACAGTCTGCCCCTCATGGAGTGGTGTT
CCTGCATGTGACCTATGTGCCTGCCCAGGAGAAGAACTTCACCACAGCCCCTGCCATCTGCCATGATG
GCAAGGCTCACTTTCCAAGGGAGGGAGTGTTTGTGAGCAATGGCACCCACTGGTTTGTGACCCAGAGG
AACTTCTATGAACCACAGATTATCACCACAGACAACACCTTTGTGTCTGGCAACTGTGATGTGGTGAT
TGGCATTGTGAACAACACAGTCTATGACCCACTCCAACCTGAACTGGACTCCTTCAAGGAGGAACTGG
ACAAATACTTCAAGAACCACACCAGCCCTGATGTGGACCTGGGAGACATCTCTGGCATCAATGCCTCT
GTGGTGAACATCCAGAAGGAGATTGACAGACTGAATGAGGTGGCTAAGAACCTGAATGAGTCCCTGAT
TGACCTCCAAGAACTGGGCAAATATGAACAATACATCAAGTGGCCATGGTACATCTGGCTGGGCTTCA
TTGCTGGACTGATTGCCATTGTGATGGTGACCATAATGCTGTGTTGTATGACCTCCTGTTGTTCCTGT
CTGAAAGGCTGTTGTTCCTGTGGCTCCTGTTGTAAGTTTGATGAGGATGACTCTGAACCTGTGCTGAA
AGGAGTGAAACTGCACTACACCTGAgtttaaacccgctgatcagcctcgactgtgccttctagttgcc
agccatctgttgtttgcccctcccccgtgccttccttgaccctggaaggtgccactcccactgtcctt
tcctaataaaatgaggaaattgcatcgcattgtctgagtaggtgtcattctattctggggggtggggt
ggggcaggacagcaagggggaggattgggaagacaatagcaggcatgctggggatgcggtgggctcta
tggcttctgaggcggaaagaaccagctggggctctagggggtatccccacgcgccctgtagcggcgca
ttaagcgcggcgggtgtggtggttacgcgcagcgtgaccgctacacttgccagcgccctagcgcccgc
tcctttcgctttcttcccttcctttctcgccacgttcgccggctttccccgtcaagctctaaatcggg
ggctccctttagggttccgatttagtgctttacggcacctcgaccccaaaaaacttgattagggtgat
ggttcacgtagtgggccatcgccctgatagacggtttttcgccctttgacgttggagtccacgttctt
taatagtggactcttgttccaaactggaacaacactcaaccctatctcggtctattcttttgatttat
aagggattttgccgatttcggcctattggttaaaaaatgagctgatttaacaaaaatttaacgcgaat
taattctgtggaatgtgtgtcagttagggtgtggaaagtccccaggctccccagcaggcagaagtatg
caaagcatgcatctcaattagtcagcaaccaggtgtggaaagtccccaggctccccagcaggcagaag
tatgcaaagcatgcatctcaattagtcagcaaccatagtcccgcccctaactccgcccatcccgcccc
taactccgcccagttccgcccattctccgccccatggctgactaattttttttatttatgcagaggcc
gaggccgcctctgcctctgagctattccagaagtagtgaggaggcttttttggaggcctaggcttttg
caaaaagctcccgggagcttgtatatccattttcggatctgatcaagagacaggatgaggatcgtttc
gcatgattgaacaagatggattgcacgcaggttctccggccgcttgggtggagaggctattcggctat
gactgggcacaacagacaatcggctgctctgatgccgccgtgttccggctgtcagcgcaggggcgccc
ggttctttttgtcaagaccgacctgtccggtgccctgaatgaactgcaggacgaggcagcgcggctat
cgtggctggccacgacgggcgttccttgcgcagctgtgctcgacgttgtcactgaagcgggaagggac
tggctgctattgggcgaagtgccggggcaggatctcctgtcatctcaccttgctcctgccgagaaagt
atccatcatggctgatgcaatgcggcggctgcatacgcttgatccggctacctgcccattcgaccacc
aagcgaaacatcgcatcgagcgagcacgtactcggatggaagccggtcttgtcgatcaggatgatctg
gacgaagagcatcaggggctcgcgccagccgaactgttcgccaggctcaaggcgcgcatgcccgacgg
cgaggatctcgtcgtgacccatggcgatgcctgcttgccgaatatcatggtggaaaatggccgctttt
ctggattcatcgactgtggccggctgggtgtggcggaccgctatcaggacatagcgttggctacccgt
gatattgctgaagagcttggcggcgaatgggctgaccgcttcctcgtgctttacggtatcgccgctcc
cgattcgcagcgcatcgccttctatcgccttcttgacgagttcttctgagcgggactctggggttcga
aatgaccgaccaagcgacgcccaacctgccatcacgagatttcgattccaccgccgccttctatgaaa
ggttgggcttcggaatcgttttccgggacgccggctggatgatcctccagcgcggggatctcatgctg
gagttcttcgcccaccccaacttgtttattgcagcttataatggttacaaataaagcaatagcatcac
aaatttcacaaataaagcatttttttcactgcattctagttgtggtttgtccaaactcatcaatgtat
cttatcatgtctgtataccgtcgacctctagctagagcttggcgtaatcatggtcatagctgtttcct
gtgtgaaattgttatccgctcacaattccacacaacatacgagccggaagcataaagtgtaaagcctg
gggtgcctaatgagtgagctaactcacattaattgcgttgcgctcactgcccgctttccagtcgggaa
acctgtcgtgccagctgcattaatgaatcggccaacgcgcggggagaggcggtttgcgtattgggcgc
tcttccgcttcctcgctcactgactcgctgcgctcggtcgttcggctgcggcgagcggtatcagctca
ctcaaaggcggtaatacggttatccacagaatcaggggataacgcaggaaagaacatgtgagcaaaag
gccagcaaaaggccaggaaccgtaaaaaggccgcgttgctggcgtttttccataggctccgcccccct
gacgagcatcacaaaaatcgacgctcaagtcagaggtggcgaaacccgacaggactataaagatacca
ggcgtttccccctggaagctccctcgtgcgctctcctgttccgaccctgccgcttaccggatacctgt
ccgcctttctcccttcgggaagcgtggcgctttctcatagctcacgctgtaggtatctcagttcggtg
taggtcgttcgctccaagctgggctgtgtgcacgaaccccccgttcagcccgaccgctgcgccttatc
cggtaactatcgtcttgagtccaacccggtaagacacgacttatcgccactggcagcagccactggta
acaggattagcagagcgaggtatgtaggcggtgctacagagttcttgaagtggtggcctaactacggc
tacactagaagaacagtatttggtatctgcgctctgctgaagccagttaccttcggaaaaagagttgg
tagctcttgatccggcaaacaaaccaccgctggtagcggtttttttgtttgcaagcagcagattacgc
gcagaaaaaaaggatctcaagaagatcctttgatcttttctacggggtctgacgctcagtggaacgaa
aactcacgttaagggattttggtcatgagattatcaaaaaggatcttcacctagatccttttaaatta
aaaatgaagttttaaatcaatctaaagtatatatgagtaaacttggtctgacagttaccaatgcttaa
tcagtgaggcacctatctcagcgatctgtctatttcgttcatccatagttgcctgactccccgtcgtg
tagataactacgatacgggagggcttaccatctggccccagtgctgcaatgataccgcgagacccacg
ctcaccggctccagatttatcagcaataaaccagccagccggaagggccgagcgcagaagtggtcctg
caactttatccgcctccatccagtctattaattgttgccgggaagctagagtaagtagttcgccagtt
aatagtttgcgcaacgttgttgccattgctacaggcatcgtggtgtcacgctcgtcgtttggtatggc
ttcattcagctccggttcccaacgatcaaggcgagttacatgatcccccatgttgtgcaaaaaagcgg
ttagctccttcggtcctccgatcgttgtcagaagtaagttggccgcagtgttatcactcatggttatg
gcagcactgcataattctcttactgtcatgccatccgtaagatgcttttctgtgactggtgagtactc
aaccaagtcattctgagaatagtgtatgcggcgaccgagttgctcttgcccggcgtcaatacgggata
ataccgcgccacatagcagaactttaaaagtgctcatcattggaaaacgttcttcggggcgaaaactc
tcaaggatcttaccgctgttgagatccagttcgatgtaacccactcgtgcacccaactgatcttcagc
atcttttactttcaccagcgtttctgggtgagcaaaaacaggaaggcaaaatgccgcaaaaaagggaa
taagggcgacacggaaatgttgaatactcatactcttcctttttcaatattattgaagcatttatcag
ggttattgtctcatgagcggatacatatttgaatgtatttagaaaaataaacaaataggggttccgcg
cacatttccccgaaaagtgccacctgacgtc
pMD125-pcDNA3.1-SARS2-GGSG-Myc-T2A-BFP-3xFLAG
SEQ ID NO: 102
gacggatcgggagatctcccgatcccctatggtgcactctcagtacaatctgctctgatgccgcatag
ttaagccagtatctgctccctgcttgtgtgttggaggtcgctgagtagtgcgcgagcaaaatttaagc
tacaacaaggcaaggcttgaccgacaattgcatgaagaatctgcttagggttaggcgttttgcgctgc
ttcgcgatgtacgggccagatatacgcgttgacattgattattgactagttattaatagtaatcaatt
acggggtcattagttcatagcccatatatggagttccgcgttacataacttacggtaaatggcccgcc
tggctgaccgcccaacgacccccgcccattgacgtcaataatgacgtatgttcccatagtaacgccaa
tagggactttccattgacgtcaatgggtggagtatttacggtaaactgcccacttggcagtacatcaa
gtgtatcatatgccaagtacgccccctattgacgtcaatgacggtaaatggcccgcctggcattatgc
ccagtacatgaccttatgggactttcctacttggcagtacatctacgtattagtcatcgctattacca
tggtgatgcggttttggcagtacatcaatgggcgtggatagcggtttgactcacggggatttccaagt
ctccaccccattgacgtcaatgggagtttgttttggcaccaaaatcaacgggactttccaaaatgtcg
taacaactccgccccattgacgcaaatgggcggtaggcgtgtacggtgggaggtctatataagcagag
ctctctggctaactagagaacccactgcttactggcttatcgaaattaatacgactcactatagggag
acccaagctggATGTTTGTGTTCCTGGTGCTGCTGCCACTGGTGTCCAGCCAGTGTGTGAACCTGACC
ACCAGGACCCAACTTCCTCCTGCCTACACCAACTCCTTCACCAGGGGAGTCTACTACCCTGACAAGGT
GTTCAGGTCCTCTGTGCTGCACAGCACCCAGGACCTGTTCCTGCCATTCTTCAGCAATGTGACCTGGT
TCCATGCCATCCATGTGTCTGGCACCAATGGCACCAAGAGGTTTGACAACCCTGTGCTGCCATTCAAT
GATGGAGTCTACTTTGCCAGCACAGAGAAGAGCAACATCATCAGGGGCTGGATTTTTGGCACCACCCT
GGACAGCAAGACCCAGTCCCTGCTGATTGTGAACAATGCCACCAATGTGGTGATTAAGGTGTGTGAGT
TCCAGTTCTGTAATGACCCATTCCTGGGAGTCTACTACCACAAGAACAACAAGTCCTGGATGGAGTCT
GAGTTCAGGGTCTACTCCTCTGCCAACAACTGTACCTTTGAATATGTGAGCCAACCATTCCTGATGGA
CTTGGAGGGCAAGCAGGGCAACTTCAAGAACCTGAGGGAGTTTGTGTTCAAGAACATTGATGGCTACT
TCAAGATTTACAGCAAACACACACCAATCAACCTGGTGAGGGACCTGCCACAGGGCTTCTCTGCCTTG
GAACCACTGGTGGACCTGCCAATTGGCATCAACATCACCAGGTTCCAGACCCTGCTGGCTCTGCACAG
GTCCTACCTGACACCTGGAGACTCCTCCTCTGGCTGGACAGCAGGAGCAGCAGCCTACTATGTGGGCT
ACCTCCAACCAAGGACCTTCCTGCTGAAATACAATGAGAATGGCACCATCACAGATGCTGTGGACTGT
GCCCTGGACCCACTGTCTGAGACCAAGTGTACCCTGAAATCCTTCACAGTGGAGAAGGGCATCTACCA
GACCAGCAACTTCAGGGTCCAACCAACAGAGAGCATTGTGAGGTTTCCAAACATCACCAACCTGTGTC
CATTTGGAGAGGTGTTCAATGCCACCAGGTTTGCCTCTGTCTATGCCTGGAACAGGAAGAGGATTAGC
AACTGTGTGGCTGACTACTCTGTGCTCTACAACTCTGCCTCCTTCAGCACCTTCAAGTGTTATGGAGT
GAGCCCAACCAAACTGAATGACCTGTGTTTCACCAATGTCTATGCTGACTCCTTTGTGATTAGGGGAG
ATGAGGTGAGACAGATTGCCCCTGGACAAACAGGCAAGATTGCTGACTACAACTACAAACTGCCTGAT
GACTTCACAGGCTGTGTGATTGCCTGGAACAGCAACAACCTGGACAGCAAGGTGGGAGGCAACTACAA
CTACCTCTACAGACTGTTCAGGAAGAGCAACCTGAAACCATTTGAGAGGGACATCAGCACAGAGATTT
ACCAGGCTGGCAGCACACCATGTAATGGAGTGGAGGGCTTCAACTGTTACTTTCCACTCCAATCCTAT
GGCTTCCAACCAACCAATGGAGTGGGCTACCAACCATACAGGGTGGTGGTGCTGTCCTTTGAACTGCT
CCATGCCCCTGCCACAGTGTGTGGACCAAAGAAGAGCACCAACCTGGTGAAGAACAAGTGTGTGAACT
TCAACTTCAATGGACTGACAGGCACAGGAGTGCTGACAGAGAGCAACAAGAAGTTCCTGCCATTCCAA
CAGTTTGGCAGGGACATTGCTGACACCACAGATGCTGTGAGGGACCCACAGACCTTGGAGATTCTGGA
CATCACACCATGTTCCTTTGGAGGAGTGTCTGTGATTACACCTGGCACCAACACCAGCAACCAGGTGG
CTGTGCTCTACCAGGATGTGAACTGTACTGAGGTGCCTGTGGCTATCCATGCTGACCAACTTACACCA
ACCTGGAGGGTCTACAGCACAGGCAGCAATGTGTTCCAGACCAGGGCTGGCTGTCTGATTGGAGCAGA
GCATGTGAACAACTCCTATGAGTGTGACATCCCAATTGGAGCAGGCATCTGTGCCTCCTACCAGACCC
AGACCAACAGCCCAAGGAGGGCAAGGTCTGTGGCAAGCCAGAGCATCATTGCCTACACAATGAGTCTG
GGAGCAGAGAACTCTGTGGCTTACAGCAACAACAGCATTGCCATCCCAACCAACTTCACCATCTCTGT
GACCACAGAGATTCTGCCTGTGAGTATGACCAAGACCTCTGTGGACTGTACAATGTATATCTGTGGAG
ACAGCACAGAGTGTAGCAACCTGCTGCTCCAATATGGCTCCTTCTGTACCCAACTTAACAGGGCTCTG
ACAGGCATTGCTGTGGAACAGGACAAGAACACCCAGGAGGTGTTTGCCCAGGTGAAGCAGATTTACAA
GACACCTCCAATCAAGGACTTTGGAGGCTTCAACTTCAGCCAGATTCTGCCTGACCCAAGCAAGCCAA
GCAAGAGGTCCTTCATTGAGGACCTGCTGTTCAACAAGGTGACCCTGGCTGATGCTGGCTTCATCAAG
CAATATGGAGACTGTCTGGGAGACATTGCTGCCAGGGACCTGATTTGTGCCCAGAAGTTCAATGGACT
GACAGTGCTGCCTCCACTGCTGACAGATGAGATGATTGCCCAATACACCTCTGCCCTGCTGGCTGGCA
CCATCACCTCTGGCTGGACCTTTGGAGCAGGAGCAGCCCTCCAAATCCCATTTGCTATGCAGATGGCT
TACAGGTTCAATGGCATTGGAGTGACCCAGAATGTGCTCTATGAGAACCAGAAACTGATTGCCAACCA
GTTCAACTCTGCCATTGGCAAGATTCAGGACTCCCTGTCCAGCACAGCCTCTGCCCTGGGCAAACTCC
AAGATGTGGTGAACCAGAATGCCCAGGCTCTGAACACCCTGGTGAAGCAACTTTCCAGCAACTTTGGA
GCCATCTCCTCTGTGCTGAATGACATCCTGAGCAGACTGGACAAGGTGGAGGCTGAGGTCCAGATTGA
CAGACTGATTACAGGCAGACTCCAATCCCTCCAAACCTATGTGACCCAACAACTTATCAGGGCTGCTG
AGATTAGGGCATCTGCCAACCTGGCTGCCACCAAGATGAGTGAGTGTGTGCTGGGACAAAGCAAGAGG
GTGGACTTCTGTGGCAAGGGCTACCACCTGATGAGTTTTCCACAGTCTGCCCCTCATGGAGTGGTGTT
CCTGCATGTGACCTATGTGCCTGCCCAGGAGAAGAACTTCACCACAGCCCCTGCCATCTGCCATGATG
GCAAGGCTCACTTTCCAAGGGAGGGAGTGTTTGTGAGCAATGGCACCCACTGGTTTGTGACCCAGAGG
AACTTCTATGAACCACAGATTATCACCACAGACAACACCTTTGTGTCTGGCAACTGTGATGTGGTGAT
TGGCATTGTGAACAACACAGTCTATGACCCACTCCAACCTGAACTGGACTCCTTCAAGGAGGAACTGG
ACAAATACTTCAAGAACCACACCAGCCCTGATGTGGACCTGGGAGACATCTCTGGCATCAATGCCTCT
GTGGTGAACATCCAGAAGGAGATTGACAGACTGAATGAGGTGGCTAAGAACCTGAATGAGTCCCTGAT
TGACCTCCAAGAACTGGGCAAATATGAACAATACATCAAGTGGCCATGGTACATCTGGCTGGGCTTCA
TTGCTGGACTGATTGCCATTGTGATGGTGACCATAATGCTGTGTTGTATGACCTCCTGTTGTTCCTGT
CTGAAAGGCTGTTGTTCCTGTGGCTCCTGTTGTAAGTTTGATGAGGATGACTCTGAACCTGTGCTGAA
AGGAGTGAAACTGCACTACACCggcggaggcagcggggagcaaaaacttatctctgaagaggacctcg
gcagtggagagggcagaggaagtctgctaacatgcggtgacgtcgaggagaatcctggcccaatggtg
tctaagggcgaagagctgattaaggagaacatgcacatgaagctgtacatggagggcaccgtggacaa
ccatcacttcaagtgcacatccgagggcgaaggcaagccctacgagggcacccagaccatgagaatca
aggtggtcgagggcggccctctccccttcgccttcgacatcctggctactagcttcctctacggcagc
aagaccttcatcaaccacacccagggcatccccgacttcttcaagcagtccttccctgagggcttcac
atgggagagagtcaccacatacgaagatgggggcgtgctgaccgctacccaggacaccagcctccagg
acggctgcctcatctacaacgtcaagatcagaggggtgaacttcacatccaacggccctgtgatgcag
aagaaaacactcggctgggaggccttcaccgagacgctgtaccccgctgacggcggcctggaaggcag
aaacgacatggccctgaagctcgtgggcgggagccatctgatcgcaaacgccaagaccacatatagat
ccaagaaacccgctaagaacctcaagatgcctggcgtctactatgtggactacagactggaaagaatc
aaggaggccaacaacgagacctacgtcgagcagcacgaggtggcagtggccagatactgcgacctccc
tagcaaactggggcacaagcttaatacgcgtgactacaaagaccatgacggtgattataaagatcatg
acatcgattacaaggatgacgatgacaagtaagtttaaacccgctgatcagcctcgactgtgccttct
agttgccagccatctgttgtttgcccctcccccgtgccttccttgaccctggaaggtgccactcccac
tgtcctttcctaataaaatgaggaaattgcatcgcattgtctgagtaggtgtcattctattctggggg
gtggggtggggcaggacagcaagggggaggattgggaagacaatagcaggcatgctggggatgcggtg
ggctctatggcttctgaggcggaaagaaccagctggggctctagggggtatccccacgcgccctgtag
cggcgcattaagcgcggcgggtgtggtggttacgcgcagcgtgaccgctacacttgccagcgccctag
cgcccgctcctttcgctttcttcccttcctttctcgccacgttcgccggctttccccgtcaagctcta
aatcgggggctccctttagggttccgatttagtgctttacggcacctcgaccccaaaaaacttgatta
gggtgatggttcacgtagtgggccatcgccctgatagacggtttttcgccctttgacgttggagtcca
cgttctttaatagtggactcttgttccaaactggaacaacactcaaccctatctcggtctattctttt
gatttataagggattttgccgatttcggcctattggttaaaaaatgagctgatttaacaaaaatttaa
cgcgaattaattctgtggaatgtgtgtcagttagggtgtggaaagtccccaggctccccagcaggcag
aagtatgcaaagcatgcatctcaattagtcagcaaccaggtgtggaaagtccccaggctccccagcag
gcagaagtatgcaaagcatgcatctcaattagtcagcaaccatagtcccgcccctaactccgcccatc
ccgcccctaactccgcccagttccgcccattctccgccccatggctgactaattttttttatttatgc
agaggccgaggccgcctctgcctctgagctattccagaagtagtgaggaggcttttttggaggcctag
gcttttgcaaaaagctcccgggagcttgtatatccattttcggatctgatcaagagacaggatgagga
tcgtttcgcatgattgaacaagatggattgcacgcaggttctccggccgcttgggtggagaggctatt
cggctatgactgggcacaacagacaatcggctgctctgatgccgccgtgttccggctgtcagcgcagg
ggcgcccggttctttttgtcaagaccgacctgtccggtgccctgaatgaactgcaggacgaggcagcg
cggctatcgtggctggccacgacgggcgttccttgcgcagctgtgctcgacgttgtcactgaagcggg
aagggactggctgctattgggcgaagtgccggggcaggatctcctgtcatctcaccttgctcctgccg
agaaagtatccatcatggctgatgcaatgcggcggctgcatacgcttgatccggctacctgcccattc
gaccaccaagcgaaacatcgcatcgagcgagcacgtactcggatggaagccggtcttgtcgatcagga
tgatctggacgaagagcatcaggggctcgcgccagccgaactgttcgccaggctcaaggcgcgcatgc
ccgacggcgaggatctcgtcgtgacccatggcgatgcctgcttgccgaatatcatggtggaaaatggc
cgcttttctggattcatcgactgtggccggctgggtgtggcggaccgctatcaggacatagcgttggc
tacccgtgatattgctgaagagcttggcggcgaatgggctgaccgcttcctcgtgctttacggtatcg
ccgctcccgattcgcagcgcatcgccttctatcgccttcttgacgagttcttctgagcgggactctgg
ggttcgaaatgaccgaccaagcgacgcccaacctgccatcacgagatttcgattccaccgccgccttc
tatgaaaggttgggcttcggaatcgttttccgggacgccggctggatgatcctccagcgcggggatct
catgctggagttcttcgcccaccccaacttgtttattgcagcttataatggttacaaataaagcaata
gcatcacaaatttcacaaataaagcatttttttcactgcattctagttgtggtttgtccaaactcatc
aatgtatcttatcatgtctgtataccgtcgacctctagctagagcttggcgtaatcatggtcatagct
gtttcctgtgtgaaattgttatccgctcacaattccacacaacatacgagccggaagcataaagtgta
aagcctggggtgcctaatgagtgagctaactcacattaattgcgttgcgctcactgcccgctttccag
tcgggaaacctgtcgtgccagctgcattaatgaatcggccaacgcgcggggagaggcggtttgcgtat
tgggcgctcttccgcttcctcgctcactgactcgctgcgctcggtcgttcggctgcggcgagcggtat
cagctcactcaaaggcggtaatacggttatccacagaatcaggggataacgcaggaaagaacatgtga
gcaaaaggccagcaaaaggccaggaaccgtaaaaaggccgcgttgctggcgtttttccataggctccg
cccccctgacgagcatcacaaaaatcgacgctcaagtcagaggtggcgaaacccgacaggactataaa
gataccaggcgtttccccctggaagctccctcgtgcgctctcctgttccgaccctgccgcttaccgga
tacctgtccgcctttctcccttcgggaagcgtggcgctttctcatagctcacgctgtaggtatctcag
ttcggtgtaggtcgttcgctccaagctgggctgtgtgcacgaaccccccgttcagcccgaccgctgcg
ccttatccggtaactatcgtcttgagtccaacccggtaagacacgacttatcgccactggcagcagcc
actggtaacaggattagcagagcgaggtatgtaggcggtgctacagagttcttgaagtggtggcctaa
ctacggctacactagaagaacagtatttggtatctgcgctctgctgaagccagttaccttcggaaaaa
gagttggtagctcttgatccggcaaacaaaccaccgctggtagcggtttttttgtttgcaagcagcag
attacgcgcagaaaaaaaggatctcaagaagatcctttgatcttttctacggggtctgacgctcagtg
gaacgaaaactcacgttaagggattttggtcatgagattatcaaaaaggatcttcacctagatccttt
taaattaaaaatgaagttttaaatcaatctaaagtatatatgagtaaacttggtctgacagttaccaa
tgcttaatcagtgaggcacctatctcagcgatctgtctatttcgttcatccatagttgcctgactccc
cgtcgtgtagataactacgatacgggagggcttaccatctggccccagtgctgcaatgataccgcgag
acccacgctcaccggctccagatttatcagcaataaaccagccagccggaagggccgagcgcagaagt
ggtcctgcaactttatccgcctccatccagtctattaattgttgccgggaagctagagtaagtagttc
gccagttaatagtttgcgcaacgttgttgccattgctacaggcatcgtggtgtcacgctcgtcgtttg
gtatggcttcattcagctccggttcccaacgatcaaggcgagttacatgatcccccatgttgtgcaaa
aaagcggttagctccttcggtcctccgatcgttgtcagaagtaagttggccgcagtgttatcactcat
ggttatggcagcactgcataattctcttactgtcatgccatccgtaagatgcttttctgtgactggtg
agtactcaaccaagtcattctgagaatagtgtatgcggcgaccgagttgctcttgcccggcgtcaata
cgggataataccgcgccacatagcagaactttaaaagtgctcatcattggaaaacgttcttcggggcg
aaaactctcaaggatcttaccgctgttgagatccagttcgatgtaacccactcgtgcacccaactgat
cttcagcatcttttactttcaccagcgtttctgggtgagcaaaaacaggaaggcaaaatgccgcaaaa
aagggaataagggcgacacggaaatgttgaatactcatactcttcctttttcaatattattgaagcat
ttatcagggttattgtctcatgagcggatacatatttgaatgtatttagaaaaataaacaaatagggg
ttccgcgcacatttccccgaaaagtgccacctgacgtc
pMD126-pcDNA3.1-SARS2-WT-GGSG-Myc-T2A-mScarlet
SEQ ID NO: 103
gacggatcgggagatctcccgatcccctatggtgcactctcagtacaatctgctctgatgccgcatag
ttaagccagtatctgctccctgcttgtgtgttggaggtcgctgagtagtgcgcgagcaaaatttaagc
tacaacaaggcaaggcttgaccgacaattgcatgaagaatctgcttagggttaggcgttttgcgctgc
ttcgcgatgtacgggccagatatacgcgttgacattgattattgactagttattaatagtaatcaatt
acggggtcattagttcatagcccatatatggagttccgcgttacataacttacggtaaatggcccgcc
tggctgaccgcccaacgacccccgcccattgacgtcaataatgacgtatgttcccatagtaacgccaa
tagggactttccattgacgtcaatgggtggagtatttacggtaaactgcccacttggcagtacatcaa
gtgtatcatatgccaagtacgccccctattgacgtcaatgacggtaaatggcccgcctggcattatgc
ccagtacatgaccttatgggactttcctacttggcagtacatctacgtattagtcatcgctattacca
tggtgatgcggttttggcagtacatcaatgggcgtggatagcggtttgactcacggggatttccaagt
ctccaccccattgacgtcaatgggagtttgttttggcaccaaaatcaacgggactttccaaaatgtcg
taacaactccgccccattgacgcaaatgggcggtaggcgtgtacggtgggaggtctatataagcagag
ctctctggctaactagagaacccactgcttactggcttatcgaaattaatacgactcactatagggag
acccaagctggATGTTTGTGTTCCTGGTGCTGCTGCCACTGGTGTCCAGCCAGTGTGTGAACCTGACC
ACCAGGACCCAACTTCCTCCTGCCTACACCAACTCCTTCACCAGGGGAGTCTACTACCCTGACAAGGT
GTTCAGGTCCTCTGTGCTGCACAGCACCCAGGACCTGTTCCTGCCATTCTTCAGCAATGTGACCTGGT
TCCATGCCATCCATGTGTCTGGCACCAATGGCACCAAGAGGTTTGACAACCCTGTGCTGCCATTCAAT
GATGGAGTCTACTTTGCCAGCACAGAGAAGAGCAACATCATCAGGGGCTGGATTTTTGGCACCACCCT
GGACAGCAAGACCCAGTCCCTGCTGATTGTGAACAATGCCACCAATGTGGTGATTAAGGTGTGTGAGT
TCCAGTTCTGTAATGACCCATTCCTGGGAGTCTACTACCACAAGAACAACAAGTCCTGGATGGAGTCT
GAGTTCAGGGTCTACTCCTCTGCCAACAACTGTACCTTTGAATATGTGAGCCAACCATTCCTGATGGA
CTTGGAGGGCAAGCAGGGCAACTTCAAGAACCTGAGGGAGTTTGTGTTCAAGAACATTGATGGCTACT
TCAAGATTTACAGCAAACACACACCAATCAACCTGGTGAGGGACCTGCCACAGGGCTTCTCTGCCTTG
GAACCACTGGTGGACCTGCCAATTGGCATCAACATCACCAGGTTCCAGACCCTGCTGGCTCTGCACAG
GTCCTACCTGACACCTGGAGACTCCTCCTCTGGCTGGACAGCAGGAGCAGCAGCCTACTATGTGGGCT
ACCTCCAACCAAGGACCTTCCTGCTGAAATACAATGAGAATGGCACCATCACAGATGCTGTGGACTGT
GCCCTGGACCCACTGTCTGAGACCAAGTGTACCCTGAAATCCTTCACAGTGGAGAAGGGCATCTACCA
GACCAGCAACTTCAGGGTCCAACCAACAGAGAGCATTGTGAGGTTTCCAAACATCACCAACCTGTGTC
CATTTGGAGAGGTGTTCAATGCCACCAGGTTTGCCTCTGTCTATGCCTGGAACAGGAAGAGGATTAGC
AACTGTGTGGCTGACTACTCTGTGCTCTACAACTCTGCCTCCTTCAGCACCTTCAAGTGTTATGGAGT
GAGCCCAACCAAACTGAATGACCTGTGTTTCACCAATGTCTATGCTGACTCCTTTGTGATTAGGGGAG
ATGAGGTGAGACAGATTGCCCCTGGACAAACAGGCAAGATTGCTGACTACAACTACAAACTGCCTGAT
GACTTCACAGGCTGTGTGATTGCCTGGAACAGCAACAACCTGGACAGCAAGGTGGGAGGCAACTACAA
CTACCTCTACAGACTGTTCAGGAAGAGCAACCTGAAACCATTTGAGAGGGACATCAGCACAGAGATTT
ACCAGGCTGGCAGCACACCATGTAATGGAGTGGAGGGCTTCAACTGTTACTTTCCACTCCAATCCTAT
GGCTTCCAACCAACCAATGGAGTGGGCTACCAACCATACAGGGTGGTGGTGCTGTCCTTTGAACTGCT
CCATGCCCCTGCCACAGTGTGTGGACCAAAGAAGAGCACCAACCTGGTGAAGAACAAGTGTGTGAACT
TCAACTTCAATGGACTGACAGGCACAGGAGTGCTGACAGAGAGCAACAAGAAGTTCCTGCCATTCCAA
CAGTTTGGCAGGGACATTGCTGACACCACAGATGCTGTGAGGGACCCACAGACCTTGGAGATTCTGGA
CATCACACCATGTTCCTTTGGAGGAGTGTCTGTGATTACACCTGGCACCAACACCAGCAACCAGGTGG
CTGTGCTCTACCAGGATGTGAACTGTACTGAGGTGCCTGTGGCTATCCATGCTGACCAACTTACACCA
ACCTGGAGGGTCTACAGCACAGGCAGCAATGTGTTCCAGACCAGGGCTGGCTGTCTGATTGGAGCAGA
GCATGTGAACAACTCCTATGAGTGTGACATCCCAATTGGAGCAGGCATCTGTGCCTCCTACCAGACCC
AGACCAACAGCCCAAGGAGGGCAAGGTCTGTGGCAAGCCAGAGCATCATTGCCTACACAATGAGTCTG
GGAGCAGAGAACTCTGTGGCTTACAGCAACAACAGCATTGCCATCCCAACCAACTTCACCATCTCTGT
GACCACAGAGATTCTGCCTGTGAGTATGACCAAGACCTCTGTGGACTGTACAATGTATATCTGTGGAG
ACAGCACAGAGTGTAGCAACCTGCTGCTCCAATATGGCTCCTTCTGTACCCAACTTAACAGGGCTCTG
ACAGGCATTGCTGTGGAACAGGACAAGAACACCCAGGAGGTGTTTGCCCAGGTGAAGCAGATTTACAA
GACACCTCCAATCAAGGACTTTGGAGGCTTCAACTTCAGCCAGATTCTGCCTGACCCAAGCAAGCCAA
GCAAGAGGTCCTTCATTGAGGACCTGCTGTTCAACAAGGTGACCCTGGCTGATGCTGGCTTCATCAAG
CAATATGGAGACTGTCTGGGAGACATTGCTGCCAGGGACCTGATTTGTGCCCAGAAGTTCAATGGACT
GACAGTGCTGCCTCCACTGCTGACAGATGAGATGATTGCCCAATACACCTCTGCCCTGCTGGCTGGCA
CCATCACCTCTGGCTGGACCTTTGGAGCAGGAGCAGCCCTCCAAATCCCATTTGCTATGCAGATGGCT
TACAGGTTCAATGGCATTGGAGTGACCCAGAATGTGCTCTATGAGAACCAGAAACTGATTGCCAACCA
GTTCAACTCTGCCATTGGCAAGATTCAGGACTCCCTGTCCAGCACAGCCTCTGCCCTGGGCAAACTCC
AAGATGTGGTGAACCAGAATGCCCAGGCTCTGAACACCCTGGTGAAGCAACTTTCCAGCAACTTTGGA
GCCATCTCCTCTGTGCTGAATGACATCCTGAGCAGACTGGACAAGGTGGAGGCTGAGGTCCAGATTGA
CAGACTGATTACAGGCAGACTCCAATCCCTCCAAACCTATGTGACCCAACAACTTATCAGGGCTGCTG
AGATTAGGGCATCTGCCAACCTGGCTGCCACCAAGATGAGTGAGTGTGTGCTGGGACAAAGCAAGAGG
GTGGACTTCTGTGGCAAGGGCTACCACCTGATGAGTTTTCCACAGTCTGCCCCTCATGGAGTGGTGTT
CCTGCATGTGACCTATGTGCCTGCCCAGGAGAAGAACTTCACCACAGCCCCTGCCATCTGCCATGATG
GCAAGGCTCACTTTCCAAGGGAGGGAGTGTTTGTGAGCAATGGCACCCACTGGTTTGTGACCCAGAGG
AACTTCTATGAACCACAGATTATCACCACAGACAACACCTTTGTGTCTGGCAACTGTGATGTGGTGAT
TGGCATTGTGAACAACACAGTCTATGACCCACTCCAACCTGAACTGGACTCCTTCAAGGAGGAACTGG
ACAAATACTTCAAGAACCACACCAGCCCTGATGTGGACCTGGGAGACATCTCTGGCATCAATGCCTCT
GTGGTGAACATCCAGAAGGAGATTGACAGACTGAATGAGGTGGCTAAGAACCTGAATGAGTCCCTGAT
TGACCTCCAAGAACTGGGCAAATATGAACAATACATCAAGTGGCCATGGTACATCTGGCTGGGCTTCA
TTGCTGGACTGATTGCCATTGTGATGGTGACCATAATGCTGTGTTGTATGACCTCCTGTTGTTCCTGT
CTGAAAGGCTGTTGTTCCTGTGGCTCCTGTTGTAAGTTTGATGAGGATGACTCTGAACCTGTGCTGAA
AGGAGTGAAACTGCACTACACCggcggaggcagcggggagcaaaaacttatctctgaagaggacctcg
gcagtggagagggcagaggaagtctgctaacatgcggtgacgtcgaggagaatcctggcccaatgagt
aaaggagaagctgtgattaaagagttcatgcgcttcaaagttcacatggagggttctatgaacggtca
cgagttcgagatcgaaggcgaaggcgagggccgtccgtatgaaggcacccagaccgccaaactgaaag
tgactaaaggcggcccgctgcctttttcctgggacatcctgagcccgcaatttatgtacggttctagg
gcgttcaccaaacacccagcggatatcccggactattataagcagtcttttccggaaggtttcaagtg
ggaacgcgtaatgaattttgaagatggtggtgccgtgaccgtcactcaggacacctccctggaggatg
gcaccctgatctataaagttaaactgcgtggtactaattttccacctgatggcccggtgatgcagaaa
aagacgatgggttgggaggcgtctaccgaacgcttgtatccggaagatggtgtgctgaaaggcgacat
taaaatggccctgcgcctgaaagatggcggccgctatctggctgacttcaaaaccacgtacaaagcca
agaaacctgtgcagatgcctggcgcgtacaatgtggaccgcaaactggacatcacctctcataatgaa
gattatacggtggtagagcaatatgagcgctccgagggtcgtcattctaccggtggcatggatgaact
atacaaataagtttaaacccgctgatcagcctcgactgtgccttctagttgccagccatctgttgttt
gcccctcccccgtgccttccttgaccctggaaggtgccactcccactgtcctttcctaataaaatgag
gaaattgcatcgcattgtctgagtaggtgtcattctattctggggggtggggtggggcaggacagcaa
gggggaggattgggaagacaatagcaggcatgctggggatgcggtgggctctatggcttctgaggcgg
aaagaaccagctggggctctagggggtatccccacgcgccctgtagcggcgcattaagcgcggcgggt
gtggtggttacgcgcagcgtgaccgctacacttgccagcgccctagcgcccgctcctttcgctttctt
cccttcctttctcgccacgttcgccggctttccccgtcaagctctaaatcgggggctccctttagggt
tccgatttagtgctttacggcacctcgaccccaaaaaacttgattagggtgatggttcacgtagtggg
ccatcgccctgatagacggtttttcgccctttgacgttggagtccacgttctttaatagtggactctt
gttccaaactggaacaacactcaaccctatctcggtctattcttttgatttataagggattttgccga
tttcggcctattggttaaaaaatgagctgatttaacaaaaatttaacgcgaattaattctgtggaatg
tgtgtcagttagggtgtggaaagtccccaggctccccagcaggcagaagtatgcaaagcatgcatctc
aattagtcagcaaccaggtgtggaaagtccccaggctccccagcaggcagaagtatgcaaagcatgca
tctcaattagtcagcaaccatagtcccgcccctaactccgcccatcccgcccctaactccgcccagtt
ccgcccattctccgccccatggctgactaattttttttatttatgcagaggccgaggccgcctctgcc
tctgagctattccagaagtagtgaggaggcttttttggaggcctaggcttttgcaaaaagctcccggg
agcttgtatatccattttcggatctgatcaagagacaggatgaggatcgtttcgcatgattgaacaag
atggattgcacgcaggttctccggccgcttgggtggagaggctattcggctatgactgggcacaacag
acaatcggctgctctgatgccgccgtgttccggctgtcagcgcaggggcgcccggttctttttgtcaa
gaccgacctgtccggtgccctgaatgaactgcaggacgaggcagcgcggctatcgtggctggccacga
cgggcgttccttgcgcagctgtgctcgacgttgtcactgaagcgggaagggactggctgctattgggc
gaagtgccggggcaggatctcctgtcatctcaccttgctcctgccgagaaagtatccatcatggctga
tgcaatgcggcggctgcatacgcttgatccggctacctgcccattcgaccaccaagcgaaacatcgca
tcgagcgagcacgtactcggatggaagccggtcttgtcgatcaggatgatctggacgaagagcatcag
gggctcgcgccagccgaactgttcgccaggctcaaggcgcgcatgcccgacggcgaggatctcgtcgt
gacccatggcgatgcctgcttgccgaatatcatggtggaaaatggccgcttttctggattcatcgact
gtggccggctgggtgtggcggaccgctatcaggacatagcgttggctacccgtgatattgctgaagag
cttggcggcgaatgggctgaccgcttcctcgtgctttacggtatcgccgctcccgattcgcagcgcat
cgccttctatcgccttcttgacgagttcttctgagcgggactctggggttcgaaatgaccgaccaagc
gacgcccaacctgccatcacgagatttcgattccaccgccgccttctatgaaaggttgggcttcggaa
tcgttttccgggacgccggctggatgatcctccagcgcggggatctcatgctggagttcttcgcccac
cccaacttgtttattgcagcttataatggttacaaataaagcaatagcatcacaaatttcacaaataa
agcatttttttcactgcattctagttgtggtttgtccaaactcatcaatgtatcttatcatgtctgta
taccgtcgacctctagctagagcttggcgtaatcatggtcatagctgtttcctgtgtgaaattgttat
ccgctcacaattccacacaacatacgagccggaagcataaagtgtaaagcctggggtgcctaatgagt
gagctaactcacattaattgcgttgcgctcactgcccgctttccagtcgggaaacctgtcgtgccagc
tgcattaatgaatcggccaacgcgcggggagaggcggtttgcgtattgggcgctcttccgcttcctcg
ctcactgactcgctgcgctcggtcgttcggctgcggcgagcggtatcagctcactcaaaggcggtaat
acggttatccacagaatcaggggataacgcaggaaagaacatgtgagcaaaaggccagcaaaaggcca
ggaaccgtaaaaaggccgcgttgctggcgtttttccataggctccgcccccctgacgagcatcacaaa
aatcgacgctcaagtcagaggtggcgaaacccgacaggactataaagataccaggcgtttccccctgg
aagctccctcgtgcgctctcctgttccgaccctgccgcttaccggatacctgtccgcctttctccctt
cgggaagcgtggcgctttctcatagctcacgctgtaggtatctcagttcggtgtaggtcgttcgctcc
aagctgggctgtgtgcacgaaccccccgttcagcccgaccgctgcgccttatccggtaactatcgtct
tgagtccaacccggtaagacacgacttatcgccactggcagcagccactggtaacaggattagcagag
cgaggtatgtaggcggtgctacagagttcttgaagtggtggcctaactacggctacactagaagaaca
gtatttggtatctgcgctctgctgaagccagttaccttcggaaaaagagttggtagctcttgatccgg
caaacaaaccaccgctggtagcggtttttttgtttgcaagcagcagattacgcgcagaaaaaaaggat
ctcaagaagatcctttgatcttttctacggggtctgacgctcagtggaacgaaaactcacgttaaggg
attttggtcatgagattatcaaaaaggatcttcacctagatccttttaaattaaaaatgaagttttaa
atcaatctaaagtatatatgagtaaacttggtctgacagttaccaatgcttaatcagtgaggcaccta
tctcagcgatctgtctatttcgttcatccatagttgcctgactccccgtcgtgtagataactacgata
cgggagggcttaccatctggccccagtgctgcaatgataccgcgagacccacgctcaccggctccaga
tttatcagcaataaaccagccagccggaagggccgagcgcagaagtggtcctgcaactttatccgcct
ccatccagtctattaattgttgccgggaagctagagtaagtagttcgccagttaatagtttgcgcaac
gttgttgccattgctacaggcatcgtggtgtcacgctcgtcgtttggtatggcttcattcagctccgg
ttcccaacgatcaaggcgagttacatgatcccccatgttgtgcaaaaaagcggttagctccttcggtc
ctccgatcgttgtcagaagtaagttggccgcagtgttatcactcatggttatggcagcactgcataat
tctcttactgtcatgccatccgtaagatgcttttctgtgactggtgagtactcaaccaagtcattctg
agaatagtgtatgcggcgaccgagttgctcttgcccggcgtcaatacgggataataccgcgccacata
gcagaactttaaaagtgctcatcattggaaaacgttcttcggggcgaaaactctcaaggatcttaccg
ctgttgagatccagttcgatgtaacccactcgtgcacccaactgatcttcagcatcttttactttcac
cagcgtttctgggtgagcaaaaacaggaaggcaaaatgccgcaaaaaagggaataagggcgacacgga
aatgttgaatactcatactcttcctttttcaatattattgaagcatttatcagggttattgtctcatg
agcggatacatatttgaatgtatttagaaaaataaacaaataggggttccgcgcacatttccccgaaa
agtgccacctgacgtc
pMD127-pcDNA3.1-SARS2-mut-v1-GGSG-Myc-T2A-mScarlet
SEQ ID NO: 104
gacggatcgggagatctcccgatcccctatggtgcactctcagtacaatctgctctgatgccgcatag
ttaagccagtatctgctccctgcttgtgtgttggaggtcgctgagtagtgcgcgagcaaaatttaagc
tacaacaaggcaaggcttgaccgacaattgcatgaagaatctgcttagggttaggcgttttgcgctgc
ttcgcgatgtacgggccagatatacgcgttgacattgattattgactagttattaatagtaatcaatt
acggggtcattagttcatagcccatatatggagttccgcgttacataacttacggtaaatggcccgcc
tggctgaccgcccaacgacccccgcccattgacgtcaataatgacgtatgttcccatagtaacgccaa
tagggactttccattgacgtcaatgggtggagtatttacggtaaactgcccacttggcagtacatcaa
gtgtatcatatgccaagtacgccccctattgacgtcaatgacggtaaatggcccgcctggcattatgc
ccagtacatgaccttatgggactttcctacttggcagtacatctacgtattagtcatcgctattacca
tggtgatgcggttttggcagtacatcaatgggcgtggatagcggtttgactcacggggatttccaagt
ctccaccccattgacgtcaatgggagtttgttttggcaccaaaatcaacgggactttccaaaatgtcg
taacaactccgccccattgacgcaaatgggcggtaggcgtgtacggtgggaggtctatataagcagag
ctctctggctaactagagaacccactgcttactggcttatcgaaattaatacgactcactatagggag
acccaagctggATGTTTGTGTTCCTGGTGCTGCTGCCACTGGTGTCCAGCCAGTGTGTGAACCTGACC
ACCAGGACCCAACTTCCTCCTGCCTACACCAACTCCTTCACCAGGGGAGTCTACTACCCTGACAAGGT
GTTCAGGTCCTCTGTGCTGCACAGCACCCAGGACCTGTTCCTGCCATTCTTCAGCAATGTGACCTGGT
TCCATGCCATCCATGTGTCTGGCACCAATGGCACCAAGAGGTTTGACAACCCTGTGCTGCCATTCAAT
GATGGAGTCTACTTTGCCAGCACAGAGAAGAGCAACATCATCAGGGGCTGGATTTTTGGCACCACCCT
GGACAGCAAGACCCAGTCCCTGCTGATTGTGAACAATGCCACCAATGTGGTGATTAAGGTGTGTGAGT
TCCAGTTCTGTAATGACCCATTCCTGGGAGTCTACTACCACAAGAACAACAAGTCCTGGATGGAGTCT
GAGTTCAGGGTCTACTCCTCTGCCAACAACTGTACCTTTGAATATGTGAGCCAACCATTCCTGATGGA
CTTGGAGGGCAAGCAGGGCAACTTCAAGAACCTGAGGGAGTTTGTGTTCAAGAACATTGATGGCTACT
TCAAGATTTACAGCAAACACACACCAATCAACCTGGTGAGGGACCTGCCACAGGGCTTCTCTGCCTTG
GAACCACTGGTGGACCTGCCAATTGGCATCAACATCACCAGGTTCCAGACCCTGCTGGCTCTGCACAG
GTCCTACCTGACACCTGGAGACTCCTCCTCTGGCTGGACAGCAGGAGCAGCAGCCTACTATGTGGGCT
ACCTCCAACCAAGGACCTTCCTGCTGAAATACAATGAGAATGGCACCATCACAGATGCTGTGGACTGT
GCCCTGGACCCACTGTCTGAGACCAAGTGTACCCTGAAATCCTTCACAGTGGAGAAGGGCATCTACCA
GACCAGCAACTTCAGGGTCCAACCAACAGAGAGCATTGTGAGGTTTCCAAACATCACCAACCTGTGTC
CATTTGGAGAGGTGTTCAATGCCACCAGGTTTGCCTCTGTCTATGCCTGGAACAGGAAGAGGATTAGC
AACTGTGTGGCTGACTACTCTGTGCTCTACAACTCTGCCTCCTTCAGCACCTTCAAGTGTTATGGAGT
GAGCCCAACCAAACTGAATGACCTGTGTTTCACCAATGTCTATGCTGACTCCTTTGTGATTAGGGGAG
ATGAGGTGAGACAGATTGCCCCTGGACAAACAGGCAAGATTGCTGACTACAACTACAAACTGCCTGAT
GACTTCACAGGCTGTGTGATTGCCTGGAACAGCgccAACCTGGACAGCAAGGTGGGAGGCAACgccAA
CTACCTCTACAGACTGTTCAGGAAGAGCAACCTGAAACCATTTGAGAGGGACATCAGCACAGAGATTT
ACCAGGCTGGCAGCACACCATGTAATGGAGTGGAGGGCTTCAACTGTTACTTTCCACTCCAATCCTAT
GGCTTCgccCCAgctgccGGAGTGGGCTACCAACCATACAGGGTGGTGGTGCTGTCCTTTGAACTGCT
CCATGCCCCTGCCACAGTGTGTGGACCAAAGAAGAGCACCAACCTGGTGAAGAACAAGTGTGTGAACT
TCAACTTCAATGGACTGACAGGCACAGGAGTGCTGACAGAGAGCAACAAGAAGTTCCTGCCATTCCAA
CAGTTTGGCAGGGACATTGCTGACACCACAGATGCTGTGAGGGACCCACAGACCTTGGAGATTCTGGA
CATCACACCATGTTCCTTTGGAGGAGTGTCTGTGATTACACCTGGCACCAACACCAGCAACCAGGTGG
CTGTGCTCTACCAGGATGTGAACTGTACTGAGGTGCCTGTGGCTATCCATGCTGACCAACTTACACCA
ACCTGGAGGGTCTACAGCACAGGCAGCAATGTGTTCCAGACCAGGGCTGGCTGTCTGATTGGAGCAGA
GCATGTGAACAACTCCTATGAGTGTGACATCCCAATTGGAGCAGGCATCTGTGCCTCCTACCAGACCC
AGACCAACAGCCCAAGGAGGGCAAGGTCTGTGGCAAGCCAGAGCATCATTGCCTACACAATGAGTCTG
GGAGCAGAGAACTCTGTGGCTTACAGCAACAACAGCATTGCCATCCCAACCAACTTCACCATCTCTGT
GACCACAGAGATTCTGCCTGTGAGTATGACCAAGACCTCTGTGGACTGTACAATGTATATCTGTGGAG
ACAGCACAGAGTGTAGCAACCTGCTGCTCCAATATGGCTCCTTCTGTACCCAACTTAACAGGGCTCTG
ACAGGCATTGCTGTGGAACAGGACAAGAACACCCAGGAGGTGTTTGCCCAGGTGAAGCAGATTTACAA
GACACCTCCAATCAAGGACTTTGGAGGCTTCAACTTCAGCCAGATTCTGCCTGACCCAAGCAAGCCAA
GCAAGAGGTCCTTCATTGAGGACCTGCTGTTCAACAAGGTGACCCTGGCTGATGCTGGCTTCATCAAG
CAATATGGAGACTGTCTGGGAGACATTGCTGCCAGGGACCTGATTTGTGCCCAGAAGTTCAATGGACT
GACAGTGCTGCCTCCACTGCTGACAGATGAGATGATTGCCCAATACACCTCTGCCCTGCTGGCTGGCA
CCATCACCTCTGGCTGGACCTTTGGAGCAGGAGCAGCCCTCCAAATCCCATTTGCTATGCAGATGGCT
TACAGGTTCAATGGCATTGGAGTGACCCAGAATGTGCTCTATGAGAACCAGAAACTGATTGCCAACCA
GTTCAACTCTGCCATTGGCAAGATTCAGGACTCCCTGTCCAGCACAGCCTCTGCCCTGGGCAAACTCC
AAGATGTGGTGAACCAGAATGCCCAGGCTCTGAACACCCTGGTGAAGCAACTTTCCAGCAACTTTGGA
GCCATCTCCTCTGTGCTGAATGACATCCTGAGCAGACTGGACAAGGTGGAGGCTGAGGTCCAGATTGA
CAGACTGATTACAGGCAGACTCCAATCCCTCCAAACCTATGTGACCCAACAACTTATCAGGGCTGCTG
AGATTAGGGCATCTGCCAACCTGGCTGCCACCAAGATGAGTGAGTGTGTGCTGGGACAAAGCAAGAGG
GTGGACTTCTGTGGCAAGGGCTACCACCTGATGAGTTTTCCACAGTCTGCCCCTCATGGAGTGGTGTT
CCTGCATGTGACCTATGTGCCTGCCCAGGAGAAGAACTTCACCACAGCCCCTGCCATCTGCCATGATG
GCAAGGCTCACTTTCCAAGGGAGGGAGTGTTTGTGAGCAATGGCACCCACTGGTTTGTGACCCAGAGG
AACTTCTATGAACCACAGATTATCACCACAGACAACACCTTTGTGTCTGGCAACTGTGATGTGGTGAT
TGGCATTGTGAACAACACAGTCTATGACCCACTCCAACCTGAACTGGACTCCTTCAAGGAGGAACTGG
ACAAATACTTCAAGAACCACACCAGCCCTGATGTGGACCTGGGAGACATCTCTGGCATCAATGCCTCT
GTGGTGAACATCCAGAAGGAGATTGACAGACTGAATGAGGTGGCTAAGAACCTGAATGAGTCCCTGAT
TGACCTCCAAGAACTGGGCAAATATGAACAATACATCAAGTGGCCATGGTACATCTGGCTGGGCTTCA
TTGCTGGACTGATTGCCATTGTGATGGTGACCATAATGCTGTGTTGTATGACCTCCTGTTGTTCCTGT
CTGAAAGGCTGTTGTTCCTGTGGCTCCTGTTGTAAGTTTGATGAGGATGACTCTGAACCTGTGCTGAA
AGGAGTGAAACTGCACTACACCggcggaggcagcggggagcaaaaacttatctctgaagaggacctcg
gcagtggagagggcagaggaagtctgctaacatgcggtgacgtcgaggagaatcctggcccaatgagt
aaaggagaagctgtgattaaagagttcatgcgcttcaaagttcacatggagggttctatgaacggtca
cgagttcgagatcgaaggcgaaggcgagggccgtccgtatgaaggcacccagaccgccaaactgaaag
tgactaaaggcggcccgctgcctttttcctgggacatcctgagcccgcaatttatgtacggttctagg
gcgttcaccaaacacccagcggatatcccggactattataagcagtcttttccggaaggtttcaagtg
ggaacgcgtaatgaattttgaagatggtggtgccgtgaccgtcactcaggacacctccctggaggatg
gcaccctgatctataaagttaaactgcgtggtactaattttccacctgatggcccggtgatgcagaaa
aagacgatgggttgggaggcgtctaccgaacgcttgtatccggaagatggtgtgctgaaaggcgacat
taaaatggccctgcgcctgaaagatggcggccgctatctggctgacttcaaaaccacgtacaaagcca
agaaacctgtgcagatgcctggcgcgtacaatgtggaccgcaaactggacatcacctctcataatgaa
gattatacggtggtagagcaatatgagcgctccgagggtcgtcattctaccggtggcatggatgaact
atacaaataagtttaaacccgctgatcagcctcgactgtgccttctagttgccagccatctgttgttt
gcccctcccccgtgccttccttgaccctggaaggtgccactcccactgtcctttcctaataaaatgag
gaaattgcatcgcattgtctgagtaggtgtcattctattctggggggtggggtggggcaggacagcaa
gggggaggattgggaagacaatagcaggcatgctggggatgcggtgggctctatggcttctgaggcgg
aaagaaccagctggggctctagggggtatccccacgcgccctgtagcggcgcattaagcgcggcgggt
gtggtggttacgcgcagcgtgaccgctacacttgccagcgccctagcgcccgctcctttcgctttctt
cccttcctttctcgccacgttcgccggctttccccgtcaagctctaaatcgggggctccctttagggt
tccgatttagtgctttacggcacctcgaccccaaaaaacttgattagggtgatggttcacgtagtggg
ccatcgccctgatagacggtttttcgccctttgacgttggagtccacgttctttaatagtggactctt
gttccaaactggaacaacactcaaccctatctcggtctattcttttgatttataagggattttgccga
tttcggcctattggttaaaaaatgagctgatttaacaaaaatttaacgcgaattaattctgtggaatg
tgtgtcagttagggtgtggaaagtccccaggctccccagcaggcagaagtatgcaaagcatgcatctc
aattagtcagcaaccaggtgtggaaagtccccaggctccccagcaggcagaagtatgcaaagcatgca
tctcaattagtcagcaaccatagtcccgcccctaactccgcccatcccgcccctaactccgcccagtt
ccgcccattctccgccccatggctgactaattttttttatttatgcagaggccgaggccgcctctgcc
tctgagctattccagaagtagtgaggaggcttttttggaggcctaggcttttgcaaaaagctcccggg
agcttgtatatccattttcggatctgatcaagagacaggatgaggatcgtttcgcatgattgaacaag
atggattgcacgcaggttctccggccgcttgggtggagaggctattcggctatgactgggcacaacag
acaatcggctgctctgatgccgccgtgttccggctgtcagcgcaggggcgcccggttctttttgtcaa
gaccgacctgtccggtgccctgaatgaactgcaggacgaggcagcgcggctatcgtggctggccacga
cgggcgttccttgcgcagctgtgctcgacgttgtcactgaagcgggaagggactggctgctattgggc
gaagtgccggggcaggatctcctgtcatctcaccttgctcctgccgagaaagtatccatcatggctga
tgcaatgcggcggctgcatacgcttgatccggctacctgcccattcgaccaccaagcgaaacatcgca
tcgagcgagcacgtactcggatggaagccggtcttgtcgatcaggatgatctggacgaagagcatcag
gggctcgcgccagccgaactgttcgccaggctcaaggcgcgcatgcccgacggcgaggatctcgtcgt
gacccatggcgatgcctgcttgccgaatatcatggtggaaaatggccgcttttctggattcatcgact
gtggccggctgggtgtggcggaccgctatcaggacatagcgttggctacccgtgatattgctgaagag
cttggcggcgaatgggctgaccgcttcctcgtgctttacggtatcgccgctcccgattcgcagcgcat
cgccttctatcgccttcttgacgagttcttctgagcgggactctggggttcgaaatgaccgaccaagc
gacgcccaacctgccatcacgagatttcgattccaccgccgccttctatgaaaggttgggcttcggaa
tcgttttccgggacgccggctggatgatcctccagcgcggggatctcatgctggagttcttcgcccac
cccaacttgtttattgcagcttataatggttacaaataaagcaatagcatcacaaatttcacaaataa
agcatttttttcactgcattctagttgtggtttgtccaaactcatcaatgtatcttatcatgtctgta
taccgtcgacctctagctagagcttggcgtaatcatggtcatagctgtttcctgtgtgaaattgttat
ccgctcacaattccacacaacatacgagccggaagcataaagtgtaaagcctggggtgcctaatgagt
gagctaactcacattaattgcgttgcgctcactgcccgctttccagtcgggaaacctgtcgtgccagc
tgcattaatgaatcggccaacgcgcggggagaggcggtttgcgtattgggcgctcttccgcttcctcg
ctcactgactcgctgcgctcggtcgttcggctgcggcgagcggtatcagctcactcaaaggcggtaat
acggttatccacagaatcaggggataacgcaggaaagaacatgtgagcaaaaggccagcaaaaggcca
ggaaccgtaaaaaggccgcgttgctggcgtttttccataggctccgcccccctgacgagcatcacaaa
aatcgacgctcaagtcagaggtggcgaaacccgacaggactataaagataccaggcgtttccccctgg
aagctccctcgtgcgctctcctgttccgaccctgccgcttaccggatacctgtccgcctttctccctt
cgggaagcgtggcgctttctcatagctcacgctgtaggtatctcagttcggtgtaggtcgttcgctcc
aagctgggctgtgtgcacgaaccccccgttcagcccgaccgctgcgccttatccggtaactatcgtct
tgagtccaacccggtaagacacgacttatcgccactggcagcagccactggtaacaggattagcagag
cgaggtatgtaggcggtgctacagagttcttgaagtggtggcctaactacggctacactagaagaaca
gtatttggtatctgcgctctgctgaagccagttaccttcggaaaaagagttggtagctcttgatccgg
caaacaaaccaccgctggtagcggtttttttgtttgcaagcagcagattacgcgcagaaaaaaaggat
ctcaagaagatcctttgatcttttctacggggtctgacgctcagtggaacgaaaactcacgttaaggg
attttggtcatgagattatcaaaaaggatcttcacctagatccttttaaattaaaaatgaagttttaa
atcaatctaaagtatatatgagtaaacttggtctgacagttaccaatgcttaatcagtgaggcaccta
tctcagcgatctgtctatttcgttcatccatagttgcctgactccccgtcgtgtagataactacgata
cgggagggcttaccatctggccccagtgctgcaatgataccgcgagacccacgctcaccggctccaga
tttatcagcaataaaccagccagccggaagggccgagcgcagaagtggtcctgcaactttatccgcct
ccatccagtctattaattgttgccgggaagctagagtaagtagttcgccagttaatagtttgcgcaac
gttgttgccattgctacaggcatcgtggtgtcacgctcgtcgtttggtatggcttcattcagctccgg
ttcccaacgatcaaggcgagttacatgatcccccatgttgtgcaaaaaagcggttagctccttcggtc
ctccgatcgttgtcagaagtaagttggccgcagtgttatcactcatggttatggcagcactgcataat
tctcttactgtcatgccatccgtaagatgcttttctgtgactggtgagtactcaaccaagtcattctg
agaatagtgtatgcggcgaccgagttgctcttgcccggcgtcaatacgggataataccgcgccacata
gcagaactttaaaagtgctcatcattggaaaacgttcttcggggcgaaaactctcaaggatcttaccg
ctgttgagatccagttcgatgtaacccactcgtgcacccaactgatcttcagcatcttttactttcac
cagcgtttctgggtgagcaaaaacaggaaggcaaaatgccgcaaaaaagggaataagggcgacacgga
aatgttgaatactcatactcttcctttttcaatattattgaagcatttatcagggttattgtctcatg
agcggatacatatttgaatgtatttagaaaaataaacaaataggggttccgcgcacatttccccgaaa
agtgccacctgacgtc
pMD128-pcDNA3.1-SARS2-mut-v2-GGSG-Myc-T2A-mScarlet
SEQ ID NO: 105
gacggatcgggagatctcccgatcccctatggtgcactctcagtacaatctgctctgatgccgcatag
ttaagccagtatctgctccctgcttgtgtgttggaggtcgctgagtagtgcgcgagcaaaatttaagc
tacaacaaggcaaggcttgaccgacaattgcatgaagaatctgcttagggttaggcgttttgcgctgc
ttcgcgatgtacgggccagatatacgcgttgacattgattattgactagttattaatagtaatcaatt
acggggtcattagttcatagcccatatatggagttccgcgttacataacttacggtaaatggcccgcc
tggctgaccgcccaacgacccccgcccattgacgtcaataatgacgtatgttcccatagtaacgccaa
tagggactttccattgacgtcaatgggtggagtatttacggtaaactgcccacttggcagtacatcaa
gtgtatcatatgccaagtacgccccctattgacgtcaatgacggtaaatggcccgcctggcattatgc
ccagtacatgaccttatgggactttcctacttggcagtacatctacgtattagtcatcgctattacca
tggtgatgcggttttggcagtacatcaatgggcgtggatagcggtttgactcacggggatttccaagt
ctccaccccattgacgtcaatgggagtttgttttggcaccaaaatcaacgggactttccaaaatgtcg
taacaactccgccccattgacgcaaatgggcggtaggcgtgtacggtgggaggtctatataagcagag
ctctctggctaactagagaacccactgcttactggcttatcgaaattaatacgactcactatagggag
acccaagctggATGTTTGTGTTCCTGGTGCTGCTGCCACTGGTGTCCAGCCAGTGTGTGAACCTGACC
ACCAGGACCCAACTTCCTCCTGCCTACACCAACTCCTTCACCAGGGGAGTCTACTACCCTGACAAGGT
GTTCAGGTCCTCTGTGCTGCACAGCACCCAGGACCTGTTCCTGCCATTCTTCAGCAATGTGACCTGGT
TCCATGCCATCCATGTGTCTGGCACCAATGGCACCAAGAGGTTTGACAACCCTGTGCTGCCATTCAAT
GATGGAGTCTACTTTGCCAGCACAGAGAAGAGCAACATCATCAGGGGCTGGATTTTTGGCACCACCCT
GGACAGCAAGACCCAGTCCCTGCTGATTGTGAACAATGCCACCAATGTGGTGATTAAGGTGTGTGAGT
TCCAGTTCTGTAATGACCCATTCCTGGGAGTCTACTACCACAAGAACAACAAGTCCTGGATGGAGTCT
GAGTTCAGGGTCTACTCCTCTGCCAACAACTGTACCTTTGAATATGTGAGCCAACCATTCCTGATGGA
CTTGGAGGGCAAGCAGGGCAACTTCAAGAACCTGAGGGAGTTTGTGTTCAAGAACATTGATGGCTACT
TCAAGATTTACAGCAAACACACACCAATCAACCTGGTGAGGGACCTGCCACAGGGCTTCTCTGCCTTG
GAACCACTGGTGGACCTGCCAATTGGCATCAACATCACCAGGTTCCAGACCCTGCTGGCTCTGCACAG
GTCCTACCTGACACCTGGAGACTCCTCCTCTGGCTGGACAGCAGGAGCAGCAGCCTACTATGTGGGCT
ACCTCCAACCAAGGACCTTCCTGCTGAAATACAATGAGAATGGCACCATCACAGATGCTGTGGACTGT
GCCCTGGACCCACTGTCTGAGACCAAGTGTACCCTGAAATCCTTCACAGTGGAGAAGGGCATCTACCA
GACCAGCAACTTCAGGGTCCAACCAACAGAGAGCATTGTGAGGTTTCCAAACATCACCAACCTGTGTC
CATTTGGAGAGGTGTTCAATGCCACCAGGTTTGCCTCTGTCTATGCCTGGAACAGGAAGAGGATTAGC
AACTGTGTGGCTGACTACTCTGTGCTCTACAACTCTGCCTCCTTCAGCACCTTCAAGTGTTATGGAGT
GAGCCCAACCAAACTGAATGACCTGTGTTTCACCAATGTCTATGCTGACTCCTTTGTGATTAGGGGAG
ATGAGGTGAGACAGATTGCCCCTGGACAAACAGGCgccATTGCTGACTACAACTACAAACTGCCTGAT
GACTTCACAGGCTGTGTGATTGCCTGGAACAGCAACAACCTGGACAGCAAGGTGGGAGGCAACTACAA
CTACCTCTACAGAgccgctAGGAAGAGCAACCTGAAACCATTTGAGAGGGACATCAGCACAGAGATTg
ccCAGGCTGGCAGCACACCATGTAATGGAGTGGAGGGCTTCAACTGTTACTTTCCACTCgccTCCTAT
GGCTTCCAACCAACCAATGGAGTGGGCTACCAACCATACAGGGTGGTGGTGCTGTCCTTTGAACTGCT
CCATGCCCCTGCCACAGTGTGTGGACCAAAGAAGAGCACCAACCTGGTGAAGAACAAGTGTGTGAACT
TCAACgccAATGGACTGACAGGCACAGGAGTGCTGACAGAGAGCAACAAGAAGTTCCTGCCATTCCAA
CAGTTTGGCAGGGACATTGCTGACACCACAGATGCTGTGAGGGACCCACAGACCTTGGAGATTCTGGA
CATCACACCATGTTCCTTTGGAGGAGTGTCTGTGATTACACCTGGCACCAACACCAGCAACCAGGTGG
CTGTGCTCTACCAGGATGTGAACTGTACTGAGGTGCCTGTGGCTATCCATGCTGACCAACTTACACCA
ACCTGGAGGGTCTACAGCACAGGCAGCAATGTGTTCCAGACCAGGGCTGGCTGTCTGATTGGAGCAGA
GCATGTGAACAACTCCTATGAGTGTGACATCCCAATTGGAGCAGGCATCTGTGCCTCCTACCAGACCC
AGACCAACAGCCCAAGGAGGGCAAGGTCTGTGGCAAGCCAGAGCATCATTGCCTACACAATGAGTCTG
GGAGCAGAGAACTCTGTGGCTTACAGCAACAACAGCATTGCCATCCCAACCAACTTCACCATCTCTGT
GACCACAGAGATTCTGCCTGTGAGTATGACCAAGACCTCTGTGGACTGTACAATGTATATCTGTGGAG
ACAGCACAGAGTGTAGCAACCTGCTGCTCCAATATGGCTCCTTCTGTACCCAACTTAACAGGGCTCTG
ACAGGCATTGCTGTGGAACAGGACAAGAACACCCAGGAGGTGTTTGCCCAGGTGAAGCAGATTTACAA
GACACCTCCAATCAAGGACTTTGGAGGCTTCAACTTCAGCCAGATTCTGCCTGACCCAAGCAAGCCAA
GCAAGAGGTCCTTCATTGAGGACCTGCTGTTCAACAAGGTGACCCTGGCTGATGCTGGCTTCATCAAG
CAATATGGAGACTGTCTGGGAGACATTGCTGCCAGGGACCTGATTTGTGCCCAGAAGTTCAATGGACT
GACAGTGCTGCCTCCACTGCTGACAGATGAGATGATTGCCCAATACACCTCTGCCCTGCTGGCTGGCA
CCATCACCTCTGGCTGGACCTTTGGAGCAGGAGCAGCCCTCCAAATCCCATTTGCTATGCAGATGGCT
TACAGGTTCAATGGCATTGGAGTGACCCAGAATGTGCTCTATGAGAACCAGAAACTGATTGCCAACCA
GTTCAACTCTGCCATTGGCAAGATTCAGGACTCCCTGTCCAGCACAGCCTCTGCCCTGGGCAAACTCC
AAGATGTGGTGAACCAGAATGCCCAGGCTCTGAACACCCTGGTGAAGCAACTTTCCAGCAACTTTGGA
GCCATCTCCTCTGTGCTGAATGACATCCTGAGCAGACTGGACAAGGTGGAGGCTGAGGTCCAGATTGA
CAGACTGATTACAGGCAGACTCCAATCCCTCCAAACCTATGTGACCCAACAACTTATCAGGGCTGCTG
AGATTAGGGCATCTGCCAACCTGGCTGCCACCAAGATGAGTGAGTGTGTGCTGGGACAAAGCAAGAGG
GTGGACTTCTGTGGCAAGGGCTACCACCTGATGAGTTTTCCACAGTCTGCCCCTCATGGAGTGGTGTT
CCTGCATGTGACCTATGTGCCTGCCCAGGAGAAGAACTTCACCACAGCCCCTGCCATCTGCCATGATG
GCAAGGCTCACTTTCCAAGGGAGGGAGTGTTTGTGAGCAATGGCACCCACTGGTTTGTGACCCAGAGG
AACTTCTATGAACCACAGATTATCACCACAGACAACACCTTTGTGTCTGGCAACTGTGATGTGGTGAT
TGGCATTGTGAACAACACAGTCTATGACCCACTCCAACCTGAACTGGACTCCTTCAAGGAGGAACTGG
ACAAATACTTCAAGAACCACACCAGCCCTGATGTGGACCTGGGAGACATCTCTGGCATCAATGCCTCT
GTGGTGAACATCCAGAAGGAGATTGACAGACTGAATGAGGTGGCTAAGAACCTGAATGAGTCCCTGAT
TGACCTCCAAGAACTGGGCAAATATGAACAATACATCAAGTGGCCATGGTACATCTGGCTGGGCTTCA
TTGCTGGACTGATTGCCATTGTGATGGTGACCATAATGCTGTGTTGTATGACCTCCTGTTGTTCCTGT
CTGAAAGGCTGTTGTTCCTGTGGCTCCTGTTGTAAGTTTGATGAGGATGACTCTGAACCTGTGCTGAA
AGGAGTGAAACTGCACTACACCggcggaggcagcggggagcaaaaacttatctctgaagaggacctcg
gcagtggagagggcagaggaagtctgctaacatgcggtgacgtcgaggagaatcctggcccaatgagt
aaaggagaagctgtgattaaagagttcatgcgcttcaaagttcacatggagggttctatgaacggtca
cgagttcgagatcgaaggcgaaggcgagggccgtccgtatgaaggcacccagaccgccaaactgaaag
tgactaaaggcggcccgctgcctttttcctgggacatcctgagcccgcaatttatgtacggttctagg
gcgttcaccaaacacccagcggatatcccggactattataagcagtcttttccggaaggtttcaagtg
ggaacgcgtaatgaattttgaagatggtggtgccgtgaccgtcactcaggacacctccctggaggatg
gcaccctgatctataaagttaaactgcgtggtactaattttccacctgatggcccggtgatgcagaaa
aagacgatgggttgggaggcgtctaccgaacgcttgtatccggaagatggtgtgctgaaaggcgacat
taaaatggccctgcgcctgaaagatggcggccgctatctggctgacttcaaaaccacgtacaaagcca
agaaacctgtgcagatgcctggcgcgtacaatgtggaccgcaaactggacatcacctctcataatgaa
gattatacggtggtagagcaatatgagcgctccgagggtcgtcattctaccggtggcatggatgaact
atacaaataagtttaaacccgctgatcagcctcgactgtgccttctagttgccagccatctgttgttt
gcccctcccccgtgccttccttgaccctggaaggtgccactcccactgtcctttcctaataaaatgag
gaaattgcatcgcattgtctgagtaggtgtcattctattctggggggtggggtggggcaggacagcaa
gggggaggattgggaagacaatagcaggcatgctggggatgcggtgggctctatggcttctgaggcgg
aaagaaccagctggggctctagggggtatccccacgcgccctgtagcggcgcattaagcgcggcgggt
gtggtggttacgcgcagcgtgaccgctacacttgccagcgccctagcgcccgctcctttcgctttctt
cccttcctttctcgccacgttcgccggctttccccgtcaagctctaaatcgggggctccctttagggt
tccgatttagtgctttacggcacctcgaccccaaaaaacttgattagggtgatggttcacgtagtggg
ccatcgccctgatagacggtttttcgccctttgacgttggagtccacgttctttaatagtggactctt
gttccaaactggaacaacactcaaccctatctcggtctattcttttgatttataagggattttgccga
tttcggcctattggttaaaaaatgagctgatttaacaaaaatttaacgcgaattaattctgtggaatg
tgtgtcagttagggtgtggaaagtccccaggctccccagcaggcagaagtatgcaaagcatgcatctc
aattagtcagcaaccaggtgtggaaagtccccaggctccccagcaggcagaagtatgcaaagcatgca
tctcaattagtcagcaaccatagtcccgcccctaactccgcccatcccgcccctaactccgcccagtt
ccgcccattctccgccccatggctgactaattttttttatttatgcagaggccgaggccgcctctgcc
tctgagctattccagaagtagtgaggaggcttttttggaggcctaggcttttgcaaaaagctcccggg
agcttgtatatccattttcggatctgatcaagagacaggatgaggatcgtttcgcatgattgaacaag
atggattgcacgcaggttctccggccgcttgggtggagaggctattcggctatgactgggcacaacag
acaatcggctgctctgatgccgccgtgttccggctgtcagcgcaggggcgcccggttctttttgtcaa
gaccgacctgtccggtgccctgaatgaactgcaggacgaggcagcgcggctatcgtggctggccacga
cgggcgttccttgcgcagctgtgctcgacgttgtcactgaagcgggaagggactggctgctattgggc
gaagtgccggggcaggatctcctgtcatctcaccttgctcctgccgagaaagtatccatcatggctga
tgcaatgcggcggctgcatacgcttgatccggctacctgcccattcgaccaccaagcgaaacatcgca
tcgagcgagcacgtactcggatggaagccggtcttgtcgatcaggatgatctggacgaagagcatcag
gggctcgcgccagccgaactgttcgccaggctcaaggcgcgcatgcccgacggcgaggatctcgtcgt
gacccatggcgatgcctgcttgccgaatatcatggtggaaaatggccgcttttctggattcatcgact
gtggccggctgggtgtggcggaccgctatcaggacatagcgttggctacccgtgatattgctgaagag
cttggcggcgaatgggctgaccgcttcctcgtgctttacggtatcgccgctcccgattcgcagcgcat
cgccttctatcgccttcttgacgagttcttctgagcgggactctggggttcgaaatgaccgaccaagc
gacgcccaacctgccatcacgagatttcgattccaccgccgccttctatgaaaggttgggcttcggaa
tcgttttccgggacgccggctggatgatcctccagcgcggggatctcatgctggagttcttcgcccac
cccaacttgtttattgcagcttataatggttacaaataaagcaatagcatcacaaatttcacaaataa
agcatttttttcactgcattctagttgtggtttgtccaaactcatcaatgtatcttatcatgtctgta
taccgtcgacctctagctagagcttggcgtaatcatggtcatagctgtttcctgtgtgaaattgttat
ccgctcacaattccacacaacatacgagccggaagcataaagtgtaaagcctggggtgcctaatgagt
gagctaactcacattaattgcgttgcgctcactgcccgctttccagtcgggaaacctgtcgtgccagc
tgcattaatgaatcggccaacgcgcggggagaggcggtttgcgtattgggcgctcttccgcttcctcg
ctcactgactcgctgcgctcggtcgttcggctgcggcgagcggtatcagctcactcaaaggcggtaat
acggttatccacagaatcaggggataacgcaggaaagaacatgtgagcaaaaggccagcaaaaggcca
ggaaccgtaaaaaggccgcgttgctggcgtttttccataggctccgcccccctgacgagcatcacaaa
aatcgacgctcaagtcagaggtggcgaaacccgacaggactataaagataccaggcgtttccccctgg
aagctccctcgtgcgctctcctgttccgaccctgccgcttaccggatacctgtccgcctttctccctt
cgggaagcgtggcgctttctcatagctcacgctgtaggtatctcagttcggtgtaggtcgttcgctcc
aagctgggctgtgtgcacgaaccccccgttcagcccgaccgctgcgccttatccggtaactatcgtct
tgagtccaacccggtaagacacgacttatcgccactggcagcagccactggtaacaggattagcagag
cgaggtatgtaggcggtgctacagagttcttgaagtggtggcctaactacggctacactagaagaaca
gtatttggtatctgcgctctgctgaagccagttaccttcggaaaaagagttggtagctcttgatccgg
caaacaaaccaccgctggtagcggtttttttgtttgcaagcagcagattacgcgcagaaaaaaaggat
ctcaagaagatcctttgatcttttctacggggtctgacgctcagtggaacgaaaactcacgttaaggg
attttggtcatgagattatcaaaaaggatcttcacctagatccttttaaattaaaaatgaagttttaa
atcaatctaaagtatatatgagtaaacttggtctgacagttaccaatgcttaatcagtgaggcaccta
tctcagcgatctgtctatttcgttcatccatagttgcctgactccccgtcgtgtagataactacgata
cgggagggcttaccatctggccccagtgctgcaatgataccgcgagacccacgctcaccggctccaga
tttatcagcaataaaccagccagccggaagggccgagcgcagaagtggtcctgcaactttatccgcct
ccatccagtctattaattgttgccgggaagctagagtaagtagttcgccagttaatagtttgcgcaac
gttgttgccattgctacaggcatcgtggtgtcacgctcgtcgtttggtatggcttcattcagctccgg
ttcccaacgatcaaggcgagttacatgatcccccatgttgtgcaaaaaagcggttagctccttcggtc
ctccgatcgttgtcagaagtaagttggccgcagtgttatcactcatggttatggcagcactgcataat
tctcttactgtcatgccatccgtaagatgcttttctgtgactggtgagtactcaaccaagtcattctg
agaatagtgtatgcggcgaccgagttgctcttgcccggcgtcaatacgggataataccgcgccacata
gcagaactttaaaagtgctcatcattggaaaacgttcttcggggcgaaaactctcaaggatcttaccg
ctgttgagatccagttcgatgtaacccactcgtgcacccaactgatcttcagcatcttttactttcac
cagcgtttctgggtgagcaaaaacaggaaggcaaaatgccgcaaaaaagggaataagggcgacacgga
aatgttgaatactcatactcttcctttttcaatattattgaagcatttatcagggttattgtctcatg
agcggatacatatttgaatgtatttagaaaaataaacaaataggggttccgcgcacatttccccgaaa
agtgccacctgacgtc
pMD129-pcDNA3.1-SARS2-mut-v3-GGSG-Myc-T2A-mScarlet
SEQ ID NO: 106
gacggatcgggagatctcccgatcccctatggtgcactctcagtacaatctgctctgatgccgcatag
ttaagccagtatctgctccctgcttgtgtgttggaggtcgctgagtagtgcgcgagcaaaatttaagc
tacaacaaggcaaggcttgaccgacaattgcatgaagaatctgcttagggttaggcgttttgcgctgc
ttcgcgatgtacgggccagatatacgcgttgacattgattattgactagttattaatagtaatcaatt
acggggtcattagttcatagcccatatatggagttccgcgttacataacttacggtaaatggcccgcc
tggctgaccgcccaacgacccccgcccattgacgtcaataatgacgtatgttcccatagtaacgccaa
tagggactttccattgacgtcaatgggtggagtatttacggtaaactgcccacttggcagtacatcaa
gtgtatcatatgccaagtacgccccctattgacgtcaatgacggtaaatggcccgcctggcattatgc
ccagtacatgaccttatgggactttcctacttggcagtacatctacgtattagtcatcgctattacca
tggtgatgcggttttggcagtacatcaatgggcgtggatagcggtttgactcacggggatttccaagt
ctccaccccattgacgtcaatgggagtttgttttggcaccaaaatcaacgggactttccaaaatgtcg
taacaactccgccccattgacgcaaatgggcggtaggcgtgtacggtgggaggtctatataagcagag
ctctctggctaactagagaacccactgcttactggcttatcgaaattaatacgactcactatagggag
acccaagctggATGTTTGTGTTCCTGGTGCTGCTGCCACTGGTGTCCAGCCAGTGTGTGAACCTGACC
ACCAGGACCCAACTTCCTCCTGCCTACACCAACTCCTTCACCAGGGGAGTCTACTACCCTGACAAGGT
GTTCAGGTCCTCTGTGCTGCACAGCACCCAGGACCTGTTCCTGCCATTCTTCAGCAATGTGACCTGGT
TCCATGCCATCCATGTGTCTGGCACCAATGGCACCAAGAGGTTTGACAACCCTGTGCTGCCATTCAAT
GATGGAGTCTACTTTGCCAGCACAGAGAAGAGCAACATCATCAGGGGCTGGATTTTTGGCACCACCCT
GGACAGCAAGACCCAGTCCCTGCTGATTGTGAACAATGCCACCAATGTGGTGATTAAGGTGTGTGAGT
TCCAGTTCTGTAATGACCCATTCCTGGGAGTCTACTACCACAAGAACAACAAGTCCTGGATGGAGTCT
GAGTTCAGGGTCTACTCCTCTGCCAACAACTGTACCTTTGAATATGTGAGCCAACCATTCCTGATGGA
CTTGGAGGGCAAGCAGGGCAACTTCAAGAACCTGAGGGAGTTTGTGTTCAAGAACATTGATGGCTACT
TCAAGATTTACAGCAAACACACACCAATCAACCTGGTGAGGGACCTGCCACAGGGCTTCTCTGCCTTG
GAACCACTGGTGGACCTGCCAATTGGCATCAACATCACCAGGTTCCAGACCCTGCTGGCTCTGCACAG
GTCCTACCTGACACCTGGAGACTCCTCCTCTGGCTGGACAGCAGGAGCAGCAGCCTACTATGTGGGCT
ACCTCCAACCAAGGACCTTCCTGCTGAAATACAATGAGAATGGCACCATCACAGATGCTGTGGACTGT
GCCCTGGACCCACTGTCTGAGACCAAGTGTACCCTGAAATCCTTCACAGTGGAGAAGGGCATCTACCA
GACCAGCAACTTCAGGGTCCAACCAACAGAGAGCATTGTGAGGTTTCCAAACATCACCAACCTGTGTC
CATTTGGAGAGGTGTTCAATGCCACCAGGTTTGCCTCTGTCTATGCCTGGAACAGGAAGAGGATTAGC
AACTGTGTGGCTGACTACTCTGTGCTCTACAACTCTGCCTCCTTCAGCACCTTCAAGTGTTATGGAGT
GAGCCCAACCAAACTGAATGACCTGTGTTTCACCAATGTCTATGCTGACTCCTTTGTGATTAGGGGAG
ATGAGGTGAGACAGATTGCCCCTGGACAAACAGGCAAGATTGCTGACTACAACTACAAACTGCCTGAT
GACTTCACAGGCTGTGTGATTGCCTGGAACAGCAACAACCTGGACAGCAAGGTGGGAGGCAACTACAA
CTACCTCTACAGACTGTTCAGGAAGAGCAACCTGAAACCATTTGAGAGGGACATCAGCACAGAGATTT
ACgctGCTGGCAGCACACCATGTAATGGAGTGGAGGGCgccgctTGTTACTTTCCACTCCAATCCTAT
GGCTTCCAACCAACCAATGGAGTGGGCTACCAACCATACAGGGTGGTGGTGCTGTCCTTTGAACTGCT
CCATGCCCCTGCCACAGTGTGTGGACCAAAGAAGAGCACCAACCTGGTGAAGAACAAGTGTGTGAACT
TCAACTTCAATGGACTGACAGGCACAGGAGTGCTGACAGAGAGCAACAAGAAGTTCCTGCCATTCCAA
CAGTTTGGCAGGGACATTGCTGACACCACAGATGCTGTGAGGGACCCACAGACCTTGGAGATTCTGGA
CATCACACCATGTTCCTTTGGAGGAGTGTCTGTGATTACACCTGGCACCAACACCAGCAACCAGGTGG
CTGTGCTCTACCAGGATGTGAACTGTACTGAGGTGCCTGTGGCTATCCATGCTGACCAACTTACACCA
ACCTGGAGGGTCTACAGCACAGGCAGCAATGTGTTCCAGACCAGGGCTGGCTGTCTGATTGGAGCAGA
GCATGTGAACAACTCCTATGAGTGTGACATCCCAATTGGAGCAGGCATCTGTGCCTCCTACCAGACCC
AGACCAACAGCCCAAGGAGGGCAAGGTCTGTGGCAAGCCAGAGCATCATTGCCTACACAATGAGTCTG
GGAGCAGAGAACTCTGTGGCTTACAGCAACAACAGCATTGCCATCCCAACCAACTTCACCATCTCTGT
GACCACAGAGATTCTGCCTGTGAGTATGACCAAGACCTCTGTGGACTGTACAATGTATATCTGTGGAG
ACAGCACAGAGTGTAGCAACCTGCTGCTCCAATATGGCTCCTTCTGTACCCAACTTAACAGGGCTCTG
ACAGGCATTGCTGTGGAACAGGACAAGAACACCCAGGAGGTGTTTGCCCAGGTGAAGCAGATTTACAA
GACACCTCCAATCAAGGACTTTGGAGGCTTCAACTTCAGCCAGATTCTGCCTGACCCAAGCAAGCCAA
GCAAGAGGTCCTTCATTGAGGACCTGCTGTTCAACAAGGTGACCCTGGCTGATGCTGGCTTCATCAAG
CAATATGGAGACTGTCTGGGAGACATTGCTGCCAGGGACCTGATTTGTGCCCAGAAGTTCAATGGACT
GACAGTGCTGCCTCCACTGCTGACAGATGAGATGATTGCCCAATACACCTCTGCCCTGCTGGCTGGCA
CCATCACCTCTGGCTGGACCTTTGGAGCAGGAGCAGCCCTCCAAATCCCATTTGCTATGCAGATGGCT
TACAGGTTCAATGGCATTGGAGTGACCCAGAATGTGCTCTATGAGAACCAGAAACTGATTGCCAACCA
GTTCAACTCTGCCATTGGCAAGATTCAGGACTCCCTGTCCAGCACAGCCTCTGCCCTGGGCAAACTCC
AAGATGTGGTGAACCAGAATGCCCAGGCTCTGAACACCCTGGTGAAGCAACTTTCCAGCAACTTTGGA
GCCATCTCCTCTGTGCTGAATGACATCCTGAGCAGACTGGACAAGGTGGAGGCTGAGGTCCAGATTGA
CAGACTGATTACAGGCAGACTCCAATCCCTCCAAACCTATGTGACCCAACAACTTATCAGGGCTGCTG
AGATTAGGGCATCTGCCAACCTGGCTGCCACCAAGATGAGTGAGTGTGTGCTGGGACAAAGCAAGAGG
GTGGACTTCTGTGGCAAGGGCTACCACCTGATGAGTTTTCCACAGTCTGCCCCTCATGGAGTGGTGTT
CCTGCATGTGACCTATGTGCCTGCCCAGGAGAAGAACTTCACCACAGCCCCTGCCATCTGCCATGATG
GCAAGGCTCACTTTCCAAGGGAGGGAGTGTTTGTGAGCAATGGCACCCACTGGTTTGTGACCCAGAGG
AACTTCTATGAACCACAGATTATCACCACAGACAACACCTTTGTGTCTGGCAACTGTGATGTGGTGAT
TGGCATTGTGAACAACACAGTCTATGACCCACTCCAACCTGAACTGGACTCCTTCAAGGAGGAACTGG
ACAAATACTTCAAGAACCACACCAGCCCTGATGTGGACCTGGGAGACATCTCTGGCATCAATGCCTCT
GTGGTGAACATCCAGAAGGAGATTGACAGACTGAATGAGGTGGCTAAGAACCTGAATGAGTCCCTGAT
TGACCTCCAAGAACTGGGCAAATATGAACAATACATCAAGTGGCCATGGTACATCTGGCTGGGCTTCA
TTGCTGGACTGATTGCCATTGTGATGGTGACCATAATGCTGTGTTGTATGACCTCCTGTTGTTCCTGT
CTGAAAGGCTGTTGTTCCTGTGGCTCCTGTTGTAAGTTTGATGAGGATGACTCTGAACCTGTGCTGAA
AGGAGTGAAACTGCACTACACCggcggaggcagcggggagcaaaaacttatctctgaagaggacctcg
gcagtggagagggcagaggaagtctgctaacatgcggtgacgtcgaggagaatcctggcccaatgagt
aaaggagaagctgtgattaaagagttcatgcgcttcaaagttcacatggagggttctatgaacggtca
cgagttcgagatcgaaggcgaaggcgagggccgtccgtatgaaggcacccagaccgccaaactgaaag
tgactaaaggcggcccgctgcctttttcctgggacatcctgagcccgcaatttatgtacggttctagg
gcgttcaccaaacacccagcggatatcccggactattataagcagtcttttccggaaggtttcaagtg
ggaacgcgtaatgaattttgaagatggtggtgccgtgaccgtcactcaggacacctccctggaggatg
gcaccctgatctataaagttaaactgcgtggtactaattttccacctgatggcccggtgatgcagaaa
aagacgatgggttgggaggcgtctaccgaacgcttgtatccggaagatggtgtgctgaaaggcgacat
taaaatggccctgcgcctgaaagatggcggccgctatctggctgacttcaaaaccacgtacaaagcca
agaaacctgtgcagatgcctggcgcgtacaatgtggaccgcaaactggacatcacctctcataatgaa
gattatacggtggtagagcaatatgagcgctccgagggtcgtcattctaccggtggcatggatgaact
atacaaataagtttaaacccgctgatcagcctcgactgtgccttctagttgccagccatctgttgttt
gcccctcccccgtgccttccttgaccctggaaggtgccactcccactgtcctttcctaataaaatgag
gaaattgcatcgcattgtctgagtaggtgtcattctattctggggggtggggtggggcaggacagcaa
gggggaggattgggaagacaatagcaggcatgctggggatgcggtgggctctatggcttctgaggcgg
aaagaaccagctggggctctagggggtatccccacgcgccctgtagcggcgcattaagcgcggcgggt
gtggtggttacgcgcagcgtgaccgctacacttgccagcgccctagcgcccgctcctttcgctttctt
cccttcctttctcgccacgttcgccggctttccccgtcaagctctaaatcgggggctccctttagggt
tccgatttagtgctttacggcacctcgaccccaaaaaacttgattagggtgatggttcacgtagtggg
ccatcgccctgatagacggtttttcgccctttgacgttggagtccacgttctttaatagtggactctt
gttccaaactggaacaacactcaaccctatctcggtctattcttttgatttataagggattttgccga
tttcggcctattggttaaaaaatgagctgatttaacaaaaatttaacgcgaattaattctgtggaatg
tgtgtcagttagggtgtggaaagtccccaggctccccagcaggcagaagtatgcaaagcatgcatctc
aattagtcagcaaccaggtgtggaaagtccccaggctccccagcaggcagaagtatgcaaagcatgca
tctcaattagtcagcaaccatagtcccgcccctaactccgcccatcccgcccctaactccgcccagtt
ccgcccattctccgccccatggctgactaattttttttatttatgcagaggccgaggccgcctctgcc
tctgagctattccagaagtagtgaggaggcttttttggaggcctaggcttttgcaaaaagctcccggg
agcttgtatatccattttcggatctgatcaagagacaggatgaggatcgtttcgcatgattgaacaag
atggattgcacgcaggttctccggccgcttgggtggagaggctattcggctatgactgggcacaacag
acaatcggctgctctgatgccgccgtgttccggctgtcagcgcaggggcgcccggttctttttgtcaa
gaccgacctgtccggtgccctgaatgaactgcaggacgaggcagcgcggctatcgtggctggccacga
cgggcgttccttgcgcagctgtgctcgacgttgtcactgaagcgggaagggactggctgctattgggc
gaagtgccggggcaggatctcctgtcatctcaccttgctcctgccgagaaagtatccatcatggctga
tgcaatgcggcggctgcatacgcttgatccggctacctgcccattcgaccaccaagcgaaacatcgca
tcgagcgagcacgtactcggatggaagccggtcttgtcgatcaggatgatctggacgaagagcatcag
gggctcgcgccagccgaactgttcgccaggctcaaggcgcgcatgcccgacggcgaggatctcgtcgt
gacccatggcgatgcctgcttgccgaatatcatggtggaaaatggccgcttttctggattcatcgact
gtggccggctgggtgtggcggaccgctatcaggacatagcgttggctacccgtgatattgctgaagag
cttggcggcgaatgggctgaccgcttcctcgtgctttacggtatcgccgctcccgattcgcagcgcat
cgccttctatcgccttcttgacgagttcttctgagcgggactctggggttcgaaatgaccgaccaagc
gacgcccaacctgccatcacgagatttcgattccaccgccgccttctatgaaaggttgggcttcggaa
tcgttttccgggacgccggctggatgatcctccagcgcggggatctcatgctggagttcttcgcccac
cccaacttgtttattgcagcttataatggttacaaataaagcaatagcatcacaaatttcacaaataa
agcatttttttcactgcattctagttgtggtttgtccaaactcatcaatgtatcttatcatgtctgta
taccgtcgacctctagctagagcttggcgtaatcatggtcatagctgtttcctgtgtgaaattgttat
ccgctcacaattccacacaacatacgagccggaagcataaagtgtaaagcctggggtgcctaatgagt
gagctaactcacattaattgcgttgcgctcactgcccgctttccagtcgggaaacctgtcgtgccagc
tgcattaatgaatcggccaacgcgcggggagaggcggtttgcgtattgggcgctcttccgcttcctcg
ctcactgactcgctgcgctcggtcgttcggctgcggcgagcggtatcagctcactcaaaggcggtaat
acggttatccacagaatcaggggataacgcaggaaagaacatgtgagcaaaaggccagcaaaaggcca
ggaaccgtaaaaaggccgcgttgctggcgtttttccataggctccgcccccctgacgagcatcacaaa
aatcgacgctcaagtcagaggtggcgaaacccgacaggactataaagataccaggcgtttccccctgg
aagctccctcgtgcgctctcctgttccgaccctgccgcttaccggatacctgtccgcctttctccctt
cgggaagcgtggcgctttctcatagctcacgctgtaggtatctcagttcggtgtaggtcgttcgctcc
aagctgggctgtgtgcacgaaccccccgttcagcccgaccgctgcgccttatccggtaactatcgtct
tgagtccaacccggtaagacacgacttatcgccactggcagcagccactggtaacaggattagcagag
cgaggtatgtaggcggtgctacagagttcttgaagtggtggcctaactacggctacactagaagaaca
gtatttggtatctgcgctctgctgaagccagttaccttcggaaaaagagttggtagctcttgatccgg
caaacaaaccaccgctggtagcggtttttttgtttgcaagcagcagattacgcgcagaaaaaaaggat
ctcaagaagatcctttgatcttttctacggggtctgacgctcagtggaacgaaaactcacgttaaggg
attttggtcatgagattatcaaaaaggatcttcacctagatccttttaaattaaaaatgaagttttaa
atcaatctaaagtatatatgagtaaacttggtctgacagttaccaatgcttaatcagtgaggcaccta
tctcagcgatctgtctatttcgttcatccatagttgcctgactccccgtcgtgtagataactacgata
cgggagggcttaccatctggccccagtgctgcaatgataccgcgagacccacgctcaccggctccaga
tttatcagcaataaaccagccagccggaagggccgagcgcagaagtggtcctgcaactttatccgcct
ccatccagtctattaattgttgccgggaagctagagtaagtagttcgccagttaatagtttgcgcaac
gttgttgccattgctacaggcatcgtggtgtcacgctcgtcgtttggtatggcttcattcagctccgg
ttcccaacgatcaaggcgagttacatgatcccccatgttgtgcaaaaaagcggttagctccttcggtc
ctccgatcgttgtcagaagtaagttggccgcagtgttatcactcatggttatggcagcactgcataat
tctcttactgtcatgccatccgtaagatgcttttctgtgactggtgagtactcaaccaagtcattctg
agaatagtgtatgcggcgaccgagttgctcttgcccggcgtcaatacgggataataccgcgccacata
gcagaactttaaaagtgctcatcattggaaaacgttcttcggggcgaaaactctcaaggatcttaccg
ctgttgagatccagttcgatgtaacccactcgtgcacccaactgatcttcagcatcttttactttcac
cagcgtttctgggtgagcaaaaacaggaaggcaaaatgccgcaaaaaagggaataagggcgacacgga
aatgttgaatactcatactcttcctttttcaatattattgaagcatttatcagggttattgtctcatg
agcggatacatatttgaatgtatttagaaaaataaacaaataggggttccgcgcacatttccccgaaa
agtgccacctgacgtc
pMD130-pcDNA3.1-SARS2-mut-v4-GGSG-Myc-T2A-mScarlet
SEQ ID NO: 107
gacggatcgggagatctcccgatcccctatggtgcactctcagtacaatctgctctgatgccgcatag
ttaagccagtatctgctccctgcttgtgtgttggaggtcgctgagtagtgcgcgagcaaaatttaagc
tacaacaaggcaaggcttgaccgacaattgcatgaagaatctgcttagggttaggcgttttgcgctgc
ttcgcgatgtacgggccagatatacgcgttgacattgattattgactagttattaatagtaatcaatt
acggggtcattagttcatagcccatatatggagttccgcgttacataacttacggtaaatggcccgcc
tggctgaccgcccaacgacccccgcccattgacgtcaataatgacgtatgttcccatagtaacgccaa
tagggactttccattgacgtcaatgggtggagtatttacggtaaactgcccacttggcagtacatcaa
gtgtatcatatgccaagtacgccccctattgacgtcaatgacggtaaatggcccgcctggcattatgc
ccagtacatgaccttatgggactttcctacttggcagtacatctacgtattagtcatcgctattacca
tggtgatgcggttttggcagtacatcaatgggcgtggatagcggtttgactcacggggatttccaagt
ctccaccccattgacgtcaatgggagtttgttttggcaccaaaatcaacgggactttccaaaatgtcg
taacaactccgccccattgacgcaaatgggcggtaggcgtgtacggtgggaggtctatataagcagag
ctctctggctaactagagaacccactgcttactggcttatcgaaattaatacgactcactatagggag
acccaagctggATGTTTGTGTTCCTGGTGCTGCTGCCACTGGTGTCCAGCCAGTGTGTGAACCTGACC
ACCAGGACCCAACTTCCTCCTGCCTACACCAACTCCTTCACCAGGGGAGTCTACTACCCTGACAAGGT
GTTCAGGTCCTCTGTGCTGCACAGCACCCAGGACCTGTTCCTGCCATTCTTCAGCAATGTGACCTGGT
TCCATGCCATCCATGTGTCTGGCACCAATGGCACCAAGAGGTTTGACAACCCTGTGCTGCCATTCAAT
GATGGAGTCTACTTTGCCAGCACAGAGAAGAGCAACATCATCAGGGGCTGGATTTTTGGCACCACCCT
GGACAGCAAGACCCAGTCCCTGCTGATTGTGAACAATGCCACCAATGTGGTGATTAAGGTGTGTGAGT
TCCAGTTCTGTAATGACCCATTCCTGGGAGTCTACTACCACAAGAACAACAAGTCCTGGATGGAGTCT
GAGTTCAGGGTCTACTCCTCTGCCAACAACTGTACCTTTGAATATGTGAGCCAACCATTCCTGATGGA
CTTGGAGGGCAAGCAGGGCAACTTCAAGAACCTGAGGGAGTTTGTGTTCAAGAACATTGATGGCTACT
TCAAGATTTACAGCAAACACACACCAATCAACCTGGTGAGGGACCTGCCACAGGGCTTCTCTGCCTTG
GAACCACTGGTGGACCTGCCAATTGGCATCAACATCACCAGGTTCCAGACCCTGCTGGCTCTGCACAG
GTCCTACCTGACACCTGGAGACTCCTCCTCTGGCTGGACAGCAGGAGCAGCAGCCTACTATGTGGGCT
ACCTCCAACCAAGGACCTTCCTGCTGAAATACAATGAGAATGGCACCATCACAGATGCTGTGGACTGT
GCCCTGGACCCACTGTCTGAGACCAAGTGTACCCTGAAATCCTTCACAGTGGAGAAGGGCATCTACCA
GACCAGCAACTTCAGGGTCCAACCAACAGAGAGCATTGTGAGGTTTCCAAACATCACCAACCTGTGTC
CATTTGGAGAGGTGTTCAATGCCACCAGGTTTGCCTCTGTCTATGCCTGGAACAGGAAGAGGATTAGC
AACTGTGTGGCTGACTACTCTGTGCTCTACAACTCTGCCTCCTTCAGCACCTTCAAGTGTTATGGAGT
GAGCCCAACCAAACTGAATGACCTGTGTTTCACCAATGTCTATGCTGACTCCTTTGTGATTAGGGGAG
ATGAGGTGAGACAGATTGCCCCTGGACAAACAGGCgccATTGCTGACTACAACTACAAACTGCCTGAT
GACTTCACAGGCTGTGTGATTGCCTGGAACAGCgccAACCTGGACAGCAAGGTGGGAGGCAACgccAA
CTACCTCTACAGAgccgctAGGAAGAGCAACCTGAAACCATTTGAGAGGGACATCAGCACAGAGATTg
ccgctGCTGGCAGCACACCATGTAATGGAGTGGAGGGCgccgctTGTTACTTTCCACTCgccTCCTAT
GGCTTCgccCCAgctgccGGAGTGGGCTACCAACCATACAGGGTGGTGGTGCTGTCCTTTGAACTGCT
CCATGCCCCTGCCACAGTGTGTGGACCAAAGAAGAGCACCAACCTGGTGAAGAACAAGTGTGTGAACT
TCAACgccAATGGACTGACAGGCACAGGAGTGCTGACAGAGAGCAACAAGAAGTTCCTGCCATTCCAA
CAGTTTGGCAGGGACATTGCTGACACCACAGATGCTGTGAGGGACCCACAGACCTTGGAGATTCTGGA
CATCACACCATGTTCCTTTGGAGGAGTGTCTGTGATTACACCTGGCACCAACACCAGCAACCAGGTGG
CTGTGCTCTACCAGGATGTGAACTGTACTGAGGTGCCTGTGGCTATCCATGCTGACCAACTTACACCA
ACCTGGAGGGTCTACAGCACAGGCAGCAATGTGTTCCAGACCAGGGCTGGCTGTCTGATTGGAGCAGA
GCATGTGAACAACTCCTATGAGTGTGACATCCCAATTGGAGCAGGCATCTGTGCCTCCTACCAGACCC
AGACCAACAGCCCAAGGAGGGCAAGGTCTGTGGCAAGCCAGAGCATCATTGCCTACACAATGAGTCTG
GGAGCAGAGAACTCTGTGGCTTACAGCAACAACAGCATTGCCATCCCAACCAACTTCACCATCTCTGT
GACCACAGAGATTCTGCCTGTGAGTATGACCAAGACCTCTGTGGACTGTACAATGTATATCTGTGGAG
ACAGCACAGAGTGTAGCAACCTGCTGCTCCAATATGGCTCCTTCTGTACCCAACTTAACAGGGCTCTG
ACAGGCATTGCTGTGGAACAGGACAAGAACACCCAGGAGGTGTTTGCCCAGGTGAAGCAGATTTACAA
GACACCTCCAATCAAGGACTTTGGAGGCTTCAACTTCAGCCAGATTCTGCCTGACCCAAGCAAGCCAA
GCAAGAGGTCCTTCATTGAGGACCTGCTGTTCAACAAGGTGACCCTGGCTGATGCTGGCTTCATCAAG
CAATATGGAGACTGTCTGGGAGACATTGCTGCCAGGGACCTGATTTGTGCCCAGAAGTTCAATGGACT
GACAGTGCTGCCTCCACTGCTGACAGATGAGATGATTGCCCAATACACCTCTGCCCTGCTGGCTGGCA
CCATCACCTCTGGCTGGACCTTTGGAGCAGGAGCAGCCCTCCAAATCCCATTTGCTATGCAGATGGCT
TACAGGTTCAATGGCATTGGAGTGACCCAGAATGTGCTCTATGAGAACCAGAAACTGATTGCCAACCA
GTTCAACTCTGCCATTGGCAAGATTCAGGACTCCCTGTCCAGCACAGCCTCTGCCCTGGGCAAACTCC
AAGATGTGGTGAACCAGAATGCCCAGGCTCTGAACACCCTGGTGAAGCAACTTTCCAGCAACTTTGGA
GCCATCTCCTCTGTGCTGAATGACATCCTGAGCAGACTGGACAAGGTGGAGGCTGAGGTCCAGATTGA
CAGACTGATTACAGGCAGACTCCAATCCCTCCAAACCTATGTGACCCAACAACTTATCAGGGCTGCTG
AGATTAGGGCATCTGCCAACCTGGCTGCCACCAAGATGAGTGAGTGTGTGCTGGGACAAAGCAAGAGG
GTGGACTTCTGTGGCAAGGGCTACCACCTGATGAGTTTTCCACAGTCTGCCCCTCATGGAGTGGTGTT
CCTGCATGTGACCTATGTGCCTGCCCAGGAGAAGAACTTCACCACAGCCCCTGCCATCTGCCATGATG
GCAAGGCTCACTTTCCAAGGGAGGGAGTGTTTGTGAGCAATGGCACCCACTGGTTTGTGACCCAGAGG
AACTTCTATGAACCACAGATTATCACCACAGACAACACCTTTGTGTCTGGCAACTGTGATGTGGTGAT
TGGCATTGTGAACAACACAGTCTATGACCCACTCCAACCTGAACTGGACTCCTTCAAGGAGGAACTGG
ACAAATACTTCAAGAACCACACCAGCCCTGATGTGGACCTGGGAGACATCTCTGGCATCAATGCCTCT
GTGGTGAACATCCAGAAGGAGATTGACAGACTGAATGAGGTGGCTAAGAACCTGAATGAGTCCCTGAT
TGACCTCCAAGAACTGGGCAAATATGAACAATACATCAAGTGGCCATGGTACATCTGGCTGGGCTTCA
TTGCTGGACTGATTGCCATTGTGATGGTGACCATAATGCTGTGTTGTATGACCTCCTGTTGTTCCTGT
CTGAAAGGCTGTTGTTCCTGTGGCTCCTGTTGTAAGTTTGATGAGGATGACTCTGAACCTGTGCTGAA
AGGAGTGAAACTGCACTACACCggcggaggcagcggggagcaaaaacttatctctgaagaggacctcg
gcagtggagagggcagaggaagtctgctaacatgcggtgacgtcgaggagaatcctggcccaatgagt
aaaggagaagctgtgattaaagagttcatgcgcttcaaagttcacatggagggttctatgaacggtca
cgagttcgagatcgaaggcgaaggcgagggccgtccgtatgaaggcacccagaccgccaaactgaaag
tgactaaaggcggcccgctgcctttttcctgggacatcctgagcccgcaatttatgtacggttctagg
gcgttcaccaaacacccagcggatatcccggactattataagcagtcttttccggaaggtttcaagtg
ggaacgcgtaatgaattttgaagatggtggtgccgtgaccgtcactcaggacacctccctggaggatg
gcaccctgatctataaagttaaactgcgtggtactaattttccacctgatggcccggtgatgcagaaa
aagacgatgggttgggaggcgtctaccgaacgcttgtatccggaagatggtgtgctgaaaggcgacat
taaaatggccctgcgcctgaaagatggcggccgctatctggctgacttcaaaaccacgtacaaagcca
agaaacctgtgcagatgcctggcgcgtacaatgtggaccgcaaactggacatcacctctcataatgaa
gattatacggtggtagagcaatatgagcgctccgagggtcgtcattctaccggtggcatggatgaact
atacaaataagtttaaacccgctgatcagcctcgactgtgccttctagttgccagccatctgttgttt
gcccctcccccgtgccttccttgaccctggaaggtgccactcccactgtcctttcctaataaaatgag
gaaattgcatcgcattgtctgagtaggtgtcattctattctggggggtggggtggggcaggacagcaa
gggggaggattgggaagacaatagcaggcatgctggggatgcggtgggctctatggcttctgaggcgg
aaagaaccagctggggctctagggggtatccccacgcgccctgtagcggcgcattaagcgcggcgggt
gtggtggttacgcgcagcgtgaccgctacacttgccagcgccctagcgcccgctcctttcgctttctt
cccttcctttctcgccacgttcgccggctttccccgtcaagctctaaatcgggggctccctttagggt
tccgatttagtgctttacggcacctcgaccccaaaaaacttgattagggtgatggttcacgtagtggg
ccatcgccctgatagacggtttttcgccctttgacgttggagtccacgttctttaatagtggactctt
gttccaaactggaacaacactcaaccctatctcggtctattcttttgatttataagggattttgccga
tttcggcctattggttaaaaaatgagctgatttaacaaaaatttaacgcgaattaattctgtggaatg
tgtgtcagttagggtgtggaaagtccccaggctccccagcaggcagaagtatgcaaagcatgcatctc
aattagtcagcaaccaggtgtggaaagtccccaggctccccagcaggcagaagtatgcaaagcatgca
tctcaattagtcagcaaccatagtcccgcccctaactccgcccatcccgcccctaactccgcccagtt
ccgcccattctccgccccatggctgactaattttttttatttatgcagaggccgaggccgcctctgcc
tctgagctattccagaagtagtgaggaggcttttttggaggcctaggcttttgcaaaaagctcccggg
agcttgtatatccattttcggatctgatcaagagacaggatgaggatcgtttcgcatgattgaacaag
atggattgcacgcaggttctccggccgcttgggtggagaggctattcggctatgactgggcacaacag
acaatcggctgctctgatgccgccgtgttccggctgtcagcgcaggggcgcccggttctttttgtcaa
gaccgacctgtccggtgccctgaatgaactgcaggacgaggcagcgcggctatcgtggctggccacga
cgggcgttccttgcgcagctgtgctcgacgttgtcactgaagcgggaagggactggctgctattgggc
gaagtgccggggcaggatctcctgtcatctcaccttgctcctgccgagaaagtatccatcatggctga
tgcaatgcggcggctgcatacgcttgatccggctacctgcccattcgaccaccaagcgaaacatcgca
tcgagcgagcacgtactcggatggaagccggtcttgtcgatcaggatgatctggacgaagagcatcag
gggctcgcgccagccgaactgttcgccaggctcaaggcgcgcatgcccgacggcgaggatctcgtcgt
gacccatggcgatgcctgcttgccgaatatcatggtggaaaatggccgcttttctggattcatcgact
gtggccggctgggtgtggcggaccgctatcaggacatagcgttggctacccgtgatattgctgaagag
cttggcggcgaatgggctgaccgcttcctcgtgctttacggtatcgccgctcccgattcgcagcgcat
cgccttctatcgccttcttgacgagttcttctgagcgggactctggggttcgaaatgaccgaccaagc
gacgcccaacctgccatcacgagatttcgattccaccgccgccttctatgaaaggttgggcttcggaa
tcgttttccgggacgccggctggatgatcctccagcgcggggatctcatgctggagttcttcgcccac
cccaacttgtttattgcagcttataatggttacaaataaagcaatagcatcacaaatttcacaaataa
agcatttttttcactgcattctagttgtggtttgtccaaactcatcaatgtatcttatcatgtctgta
taccgtcgacctctagctagagcttggcgtaatcatggtcatagctgtttcctgtgtgaaattgttat
ccgctcacaattccacacaacatacgagccggaagcataaagtgtaaagcctggggtgcctaatgagt
gagctaactcacattaattgcgttgcgctcactgcccgctttccagtcgggaaacctgtcgtgccagc
tgcattaatgaatcggccaacgcgcggggagaggcggtttgcgtattgggcgctcttccgcttcctcg
ctcactgactcgctgcgctcggtcgttcggctgcggcgagcggtatcagctcactcaaaggcggtaat
acggttatccacagaatcaggggataacgcaggaaagaacatgtgagcaaaaggccagcaaaaggcca
ggaaccgtaaaaaggccgcgttgctggcgtttttccataggctccgcccccctgacgagcatcacaaa
aatcgacgctcaagtcagaggtggcgaaacccgacaggactataaagataccaggcgtttccccctgg
aagctccctcgtgcgctctcctgttccgaccctgccgcttaccggatacctgtccgcctttctccctt
cgggaagcgtggcgctttctcatagctcacgctgtaggtatctcagttcggtgtaggtcgttcgctcc
aagctgggctgtgtgcacgaaccccccgttcagcccgaccgctgcgccttatccggtaactatcgtct
tgagtccaacccggtaagacacgacttatcgccactggcagcagccactggtaacaggattagcagag
cgaggtatgtaggcggtgctacagagttcttgaagtggtggcctaactacggctacactagaagaaca
gtatttggtatctgcgctctgctgaagccagttaccttcggaaaaagagttggtagctcttgatccgg
caaacaaaccaccgctggtagcggtttttttgtttgcaagcagcagattacgcgcagaaaaaaaggat
ctcaagaagatcctttgatcttttctacggggtctgacgctcagtggaacgaaaactcacgttaaggg
attttggtcatgagattatcaaaaaggatcttcacctagatccttttaaattaaaaatgaagttttaa
atcaatctaaagtatatatgagtaaacttggtctgacagttaccaatgcttaatcagtgaggcaccta
tctcagcgatctgtctatttcgttcatccatagttgcctgactccccgtcgtgtagataactacgata
cgggagggcttaccatctggccccagtgctgcaatgataccgcgagacccacgctcaccggctccaga
tttatcagcaataaaccagccagccggaagggccgagcgcagaagtggtcctgcaactttatccgcct
ccatccagtctattaattgttgccgggaagctagagtaagtagttcgccagttaatagtttgcgcaac
gttgttgccattgctacaggcatcgtggtgtcacgctcgtcgtttggtatggcttcattcagctccgg
ttcccaacgatcaaggcgagttacatgatcccccatgttgtgcaaaaaagcggttagctccttcggtc
ctccgatcgttgtcagaagtaagttggccgcagtgttatcactcatggttatggcagcactgcataat
tctcttactgtcatgccatccgtaagatgcttttctgtgactggtgagtactcaaccaagtcattctg
agaatagtgtatgcggcgaccgagttgctcttgcccggcgtcaatacgggataataccgcgccacata
gcagaactttaaaagtgctcatcattggaaaacgttcttcggggcgaaaactctcaaggatcttaccg
ctgttgagatccagttcgatgtaacccactcgtgcacccaactgatcttcagcatcttttactttcac
cagcgtttctgggtgagcaaaaacaggaaggcaaaatgccgcaaaaaagggaataagggcgacacgga
aatgttgaatactcatactcttcctttttcaatattattgaagcatttatcagggttattgtctcatg
agcggatacatatttgaatgtatttagaaaaataaacaaataggggttccgcgcacatttccccgaaa
agtgccacctgacgtc
pMD131_pcDNA3.1_SARS-CoV-2_stabilized-S-protein_mut_v1
SEQ ID NO: 108
gacggatcgggagatctcccgatcccctatggtgcactctcagtacaatctgctctgatgccgcatag
ttaagccagtatctgctccctgcttgtgtgttggaggtcgctgagtagtgcgcgagcaaaatttaagc
tacaacaaggcaaggcttgaccgacaattgcatgaagaatctgcttagggttaggcgttttgcgctgc
ttcgcgatgtacgggccagatatacgcgttgacattgattattgactagttattaatagtaatcaatt
acggggtcattagttcatagcccatatatggagttccgcgttacataacttacggtaaatggcccgcc
tggctgaccgcccaacgacccccgcccattgacgtcaataatgacgtatgttcccatagtaacgccaa
tagggactttccattgacgtcaatgggtggagtatttacggtaaactgcccacttggcagtacatcaa
gtgtatcatatgccaagtacgccccctattgacgtcaatgacggtaaatggcccgcctggcattatgc
ccagtacatgaccttatgggactttcctacttggcagtacatctacgtattagtcatcgctattacca
tggtgatgcggttttggcagtacatcaatgggcgtggatagcggtttgactcacggggatttccaagt
ctccaccccattgacgtcaatgggagtttgttttggcaccaaaatcaacgggactttccaaaatgtcg
taacaactccgccccattgacgcaaatgggcggtaggcgtgtacggtgggaggtctatataagcagag
ctctctggctaactagagaacccactgcttactggcttatcgaaattaatacgactcactatagggag
acccaagctggATGTTTGTGTTCCTGGTGCTGCTGCCACTGGTGTCCAGCCAGTGTGTGAACCTGACC
ACCAGGACCCAACTTCCTCCTGCCTACACCAACTCCTTCACCAGGGGAGTCTACTACCCTGACAAGGT
GTTCAGGTCCTCTGTGCTGCACAGCACCCAGGACCTGTTCCTGCCATTCTTCAGCAATGTGACCTGGT
TCCATGCCATCCATGTGTCTGGCACCAATGGCACCAAGAGGTTTGACAACCCTGTGCTGCCATTCAAT
GATGGAGTCTACTTTGCCAGCACAGAGAAGAGCAACATCATCAGGGGCTGGATTTTTGGCACCACCCT
GGACAGCAAGACCCAGTCCCTGCTGATTGTGAACAATGCCACCAATGTGGTGATTAAGGTGTGTGAGT
TCCAGTTCTGTAATGACCCATTCCTGGGAGTCTACTACCACAAGAACAACAAGTCCTGGATGGAGTCT
GAGTTCAGGGTCTACTCCTCTGCCAACAACTGTACCTTTGAATATGTGAGCCAACCATTCCTGATGGA
CTTGGAGGGCAAGCAGGGCAACTTCAAGAACCTGAGGGAGTTTGTGTTCAAGAACATTGATGGCTACT
TCAAGATTTACAGCAAACACACACCAATCAACCTGGTGAGGGACCTGCCACAGGGCTTCTCTGCCTTG
GAACCACTGGTGGACCTGCCAATTGGCATCAACATCACCAGGTTCCAGACCCTGCTGGCTCTGCACAG
GTCCTACCTGACACCTGGAGACTCCTCCTCTGGCTGGACAGCAGGAGCAGCAGCCTACTATGTGGGCT
ACCTCCAACCAAGGACCTTCCTGCTGAAATACAATGAGAATGGCACCATCACAGATGCTGAGGGCAAG
CAGGGCAACTTCAAGAACCTGAGGGAGTTTGTGTTCAAGAACATTGATGGCTACTTCAAGATTTACAG
CAAACACACACCAATCAACCTGGTGAGGGACCTGCCACAGGGCTTCTCTGCCTTGGAACCACTGGTGG
ACCTGCCAATTGGCATCAACATCACCAGGTTCCAGACCCTGCTGGCTCTGCACAGGTCCTACCTGACA
CCTGGAGACTCCTCCTCTGGCTGGACAGCAGGAGCAGCAGCCTACTATGTGGGCTACCTCCAACCAAG
GACCTTCCTGCTGAAATACAATGAGAATGGCACCATCACAGATGCTGTGGACTGTGCCCTGGACCCAC
TGTCTGAGACCAAGTGTACCCTGAAATCCTTCACAGTGGAGAAGGGCATCTACCAGACCAGCAACTTC
AGGGTCCAACCAACAGAGAGCATTGTGAGGTTTCCAAACATCACCAACCTGTGTCCATTTGGAGAGGT
GTTCAATGCCACCAGGTTTGCCTCTGTCTATGCCTGGAACAGGAAGAGGATTAGCAACTGTGTGGCTG
ACTACTCTGTGCTCTACAACTCTGCCTCCTTCAGCACCTTCAAGTGTTATGGAGTGAGCCCAACCAAA
CTGAATGACCTGTGTTTCACCAATGTCTATGCTGACTCCTTTGTGATTAGGGGAGATGAGGTGAGACA
GATTGCCCCTGGACAAACAGGCAAGATTGCTGACTACAACTACAAACTGCCTGATGACTTCACAGGCT
GTGTGATTGCCTGGAACAGCgccAACCTGGACAGCAAGGTGGGAGGCAACgccAACTACCTCTACAGA
CTGTTCAGGAAGAGCAACCTGAAACCATTTGAGAGGGACATCAGCACAGAGATTTACCAGGCTGGCAG
CACACCATGTAATGGAGTGGAGGGCTTCAACTGTTACTTTCCACTCCAATCCTATGGCTTCgccCCAg
ctgccGGAGTGGGCTACCAACCATACAGGGTGGTGGTGCTGTCCTTTGAACTGCTCCATGCCCCTGCC
ACAGTGTGTGGACCAAAGAAGAGCACCAACCTGGTGAAGAACAAGTGTGTGAACTTCAACTTCAATGG
ACTGACAGGCACAGGAGTGCTGACAGAGAGCAACAAGAAGTTCCTGCCATTCCAACAGTTTGGCAGGG
ACATTGCTGACACCACAGATGCTGTGAGGGACCCACAGACCTTGGAGATTCTGGACATCACACCATGT
TCCTTTGGAGGAGTGTCTGTGATTACACCTGGCACCAACACCAGCAACCAGGTGGCTGTGCTCTACCA
GGATGTGAACTGTACTGAGGTGCCTGTGGCTATCCATGCTGACCAACTTACACCAACCTGGAGGGTCT
ACAGCACAGGCAGCAATGTGTTCCAGACCAGGGCTGGCTGTCTGATTGGAGCAGAGCATGTGAACAAC
TCCTATGAGTGTGACATCCCAATTGGAGCAGGCATCTGTGCCTCCTACCAGACCCAGACCAACAGCCC
AAGGAGGGCAAGGTCTGTGGCAAGCCAGAGCATCATTGCCTACACAATGAGTCTGGGAGCAGAGAACT
CTGTGGCTTACAGCAACAACAGCATTGCCATCCCAACCAACTTCACCATCTCTGTGACCACAGAGATT
CTGCCTGTGAGTATGACCAAGACCTCTGTGGACTGTACAATGTATATCTGTGGAGACAGCACAGAGTG
TAGCAACCTGCTGCTCCAATATGGCTCCTTCTGTACCCAACTTAACAGGGCTCTGACAGGCATTGCTG
TGGAACAGGACAAGAACACCCAGGAGGTGTTTGCCCAGGTGAAGCAGATTTACAAGACACCTCCAATC
AAGGACTTTGGAGGCTTCAACTTCAGCCAGATTCTGCCTGACCCAAGCAAGCCAAGCAAGAGGTCCTT
CATTGAGGACCTGCTGTTCAACAAGGTGACCCTGGCTGATGCTGGCTTCATCAAGCAATATGGAGACT
GTCTGGGAGACATTGCTGCCAGGGACCTGATTTGTGCCCAGAAGTTCAATGGACTGACAGTGCTGCCT
CCACTGCTGACAGATGAGATGATTGCCCAATACACCTCTGCCCTGCTGGCTGGCACCATCACCTCTGG
CTGGACCTTTGGAGCAGGAGCAGCCCTCCAAATCCCATTTGCTATGCAGATGGCTTACAGGTTCAATG
GCATTGGAGTGACCCAGAATGTGCTCTATGAGAACCAGAAACTGATTGCCAACCAGTTCAACTCTGCC
ATTGGCAAGATTCAGGACTCCCTGTCCAGCACAGCCTCTGCCCTGGGCAAACTCCAAGATGTGGTGAA
CCAGAATGCCCAGGCTCTGAACACCCTGGTGAAGCAACTTTCCAGCAACTTTGGAGCCATCTCCTCTG
TGCTGAATGACATCCTGAGCAGACTGGACcctcccGAGGCTGAGGTCCAGATTGACAGACTGATTACA
GGCAGACTCCAATCCCTCCAAACCTATGTGACCCAACAACTTATCAGGGCTGCTGAGATTAGGGCATC
TGCCAACCTGGCTGCCACCAAGATGAGTGAGTGTGTGCTGGGACAAAGCAAGAGGGTGGACTTCTGTG
GCAAGGGCTACCACCTGATGAGTTTTCCACAGTCTGCCCCTCATGGAGTGGTGTTCCTGCATGTGACC
TATGTGCCTGCCCAGGAGAAGAACTTCACCACAGCCCCTGCCATCTGCCATGATGGCAAGGCTCACTT
TCCAAGGGAGGGAGTGTTTGTGAGCAATGGCACCCACTGGTTTGTGACCCAGAGGAACTTCTATGAAC
CACAGATTATCACCACAGACAACACCTTTGTGTCTGGCAACTGTGATGTGGTGATTGGCATTGTGAAC
AACACAGTCTATGACCCACTCCAACCTGAACTGGACTCCTTCAAGGAGGAACTGGACAAATACTTCAA
GAACCACACCAGCCCTGATGTGGACCTGGGAGACATCTCTGGCATCAATGCCTCTGTGGTGAACATCC
AGAAGGAGATTGACAGACTGAATGAGGTGGCTAAGAACCTGAATGAGTCCCTGATTGACCTCCAAGAA
CTGGGCAAATAAgtttaaacccgctgatcagcctcgactgtgccttctagttgccagccatctgttgt
ttgcccctcccccgtgccttccttgaccctggaaggtgccactcccactgtcctttcctaataaaatg
aggaaattgcatcgcattgtctgagtaggtgtcattctattctggggggtggggtggggcaggacagc
aagggggaggattgggaagacaatagcaggcatgctggggatgcggtgggctctatggcttctgaggc
ggaaagaaccagctggggctctagggggtatccccacgcgccctgtagcggcgcattaagcgcggcgg
gtgtggtggttacgcgcagcgtgaccgctacacttgccagcgccctagcgcccgctcctttcgctttc
ttcccttcctttctcgccacgttcgccggctttccccgtcaagctctaaatcgggggctccctttagg
gttccgatttagtgctttacggcacctcgaccccaaaaaacttgattagggtgatggttcacgtagtg
ggccatcgccctgatagacggtttttcgccctttgacgttggagtccacgttctttaatagtggactc
ttgttccaaactggaacaacactcaaccctatctcggtctattcttttgatttataagggattttgcc
gatttcggcctattggttaaaaaatgagctgatttaacaaaaatttaacgcgaattaattctgtggaa
tgtgtgtcagttagggtgtggaaagtccccaggctccccagcaggcagaagtatgcaaagcatgcatc
tcaattagtcagcaaccaggtgtggaaagtccccaggctccccagcaggcagaagtatgcaaagcatg
catctcaattagtcagcaaccatagtcccgcccctaactccgcccatcccgcccctaactccgcccag
ttccgcccattctccgccccatggctgactaattttttttatttatgcagaggccgaggccgcctctg
cctctgagctattccagaagtagtgaggaggcttttttggaggcctaggcttttgcaaaaagctcccg
ggagcttgtatatccattttcggatctgatcaagagacaggatgaggatcgtttcgcatgattgaaca
agatggattgcacgcaggttctccggccgcttgggtggagaggctattcggctatgactgggcacaac
agacaatcggctgctctgatgccgccgtgttccggctgtcagcgcaggggcgcccggttctttttgtc
aagaccgacctgtccggtgccctgaatgaactgcaggacgaggcagcgcggctatcgtggctggccac
gacgggcgttccttgcgcagctgtgctcgacgttgtcactgaagcgggaagggactggctgctattgg
gcgaagtgccggggcaggatctcctgtcatctcaccttgctcctgccgagaaagtatccatcatggct
gatgcaatgcggcggctgcatacgcttgatccggctacctgcccattcgaccaccaagcgaaacatcg
catcgagcgagcacgtactcggatggaagccggtcttgtcgatcaggatgatctggacgaagagcatc
aggggctcgcgccagccgaactgttcgccaggctcaaggcgcgcatgcccgacggcgaggatctcgtc
gtgacccatggcgatgcctgcttgccgaatatcatggtggaaaatggccgcttttctggattcatcga
ctgtggccggctgggtgtggcggaccgctatcaggacatagcgttggctacccgtgatattgctgaag
agcttggcggcgaatgggctgaccgcttcctcgtgctttacggtatcgccgctcccgattcgcagcgc
atcgccttctatcgccttcttgacgagttcttctgagcgggactctggggttcgaaatgaccgaccaa
gcgacgcccaacctgccatcacgagatttcgattccaccgccgccttctatgaaaggttgggcttcgg
aatcgttttccgggacgccggctggatgatcctccagcgcggggatctcatgctggagttcttcgccc
accccaacttgtttattgcagcttataatggttacaaataaagcaatagcatcacaaatttcacaaat
aaagcatttttttcactgcattctagttgtggtttgtccaaactcatcaatgtatcttatcatgtctg
tataccgtcgacctctagctagagcttggcgtaatcatggtcatagctgtttcctgtgtgaaattgtt
atccgctcacaattccacacaacatacgagccggaagcataaagtgtaaagcctggggtgcctaatga
gtgagctaactcacattaattgcgttgcgctcactgcccgctttccagtcgggaaacctgtcgtgcca
gctgcattaatgaatcggccaacgcgcggggagaggcggtttgcgtattgggcgctcttccgcttcct
cgctcactgactcgctgcgctcggtcgttcggctgcggcgagcggtatcagctcactcaaaggcggta
atacggttatccacagaatcaggggataacgcaggaaagaacatgtgagcaaaaggccagcaaaaggc
caggaaccgtaaaaaggccgcgttgctggcgtttttccataggctccgcccccctgacgagcatcaca
aaaatcgacgctcaagtcagaggtggcgaaacccgacaggactataaagataccaggcgtttccccct
ggaagctccctcgtgcgctctcctgttccgaccctgccgcttaccggatacctgtccgcctttctccc
ttcgggaagcgtggcgctttctcatagctcacgctgtaggtatctcagttcggtgtaggtcgttcgct
ccaagctgggctgtgtgcacgaaccccccgttcagcccgaccgctgcgccttatccggtaactatcgt
cttgagtccaacccggtaagacacgacttatcgccactggcagcagccactggtaacaggattagcag
agcgaggtatgtaggcggtgctacagagttcttgaagtggtggcctaactacggctacactagaagaa
cagtatttggtatctgcgctctgctgaagccagttaccttcggaaaaagagttggtagctcttgatcc
ggcaaacaaaccaccgctggtagcggtttttttgtttgcaagcagcagattacgcgcagaaaaaaagg
atctcaagaagatcctttgatcttttctacggggtctgacgctcagtggaacgaaaactcacgttaag
ggattttggtcatgagattatcaaaaaggatcttcacctagatccttttaaattaaaaatgaagtttt
aaatcaatctaaagtatatatgagtaaacttggtctgacagttaccaatgcttaatcagtgaggcacc
tatctcagcgatctgtctatttcgttcatccatagttgcctgactccccgtcgtgtagataactacga
tacgggagggcttaccatctggccccagtgctgcaatgataccgcgagacccacgctcaccggctcca
gatttatcagcaataaaccagccagccggaagggccgagcgcagaagtggtcctgcaactttatccgc
ctccatccagtctattaattgttgccgggaagctagagtaagtagttcgccagttaatagtttgcgca
acgttgttgccattgctacaggcatcgtggtgtcacgctcgtcgtttggtatggcttcattcagctcc
ggttcccaacgatcaaggcgagttacatgatcccccatgttgtgcaaaaaagcggttagctccttcgg
tcctccgatcgttgtcagaagtaagttggccgcagtgttatcactcatggttatggcagcactgcata
attctcttactgtcatgccatccgtaagatgcttttctgtgactggtgagtactcaaccaagtcattc
tgagaatagtgtatgcggcgaccgagttgctcttgcccggcgtcaatacgggataataccgcgccaca
tagcagaactttaaaagtgctcatcattggaaaacgttcttcggggcgaaaactctcaaggatcttac
cgctgttgagatccagttcgatgtaacccactcgtgcacccaactgatcttcagcatcttttactttc
accagcgtttctgggtgagcaaaaacaggaaggcaaaatgccgcaaaaaagggaataagggcgacacg
gaaatgttgaatactcatactcttcctttttcaatattattgaagcatttatcagggttattgtctca
tgagcggatacatatttgaatgtatttagaaaaataaacaaataggggttccgcgcacatttccccga
aaagtgccacctgacgtc
pMD132_pcDNA3.1_SARS-CoV-2_stabilized-S-protein_mut_v2
SEQ ID NO: 109
gacggatcgggagatctcccgatcccctatggtgcactctcagtacaatctgctctgatgccgcatag
ttaagccagtatctgctccctgcttgtgtgttggaggtcgctgagtagtgcgcgagcaaaatttaagc
tacaacaaggcaaggcttgaccgacaattgcatgaagaatctgcttagggttaggcgttttgcgctgc
ttcgcgatgtacgggccagatatacgcgttgacattgattattgactagttattaatagtaatcaatt
acggggtcattagttcatagcccatatatggagttccgcgttacataacttacggtaaatggcccgcc
tggctgaccgcccaacgacccccgcccattgacgtcaataatgacgtatgttcccatagtaacgccaa
tagggactttccattgacgtcaatgggtggagtatttacggtaaactgcccacttggcagtacatcaa
gtgtatcatatgccaagtacgccccctattgacgtcaatgacggtaaatggcccgcctggcattatgc
ccagtacatgaccttatgggactttcctacttggcagtacatctacgtattagtcatcgctattacca
tggtgatgcggttttggcagtacatcaatgggcgtggatagcggtttgactcacggggatttccaagt
ctccaccccattgacgtcaatgggagtttgttttggcaccaaaatcaacgggactttccaaaatgtcg
taacaactccgccccattgacgcaaatgggcggtaggcgtgtacggtgggaggtctatataagcagag
ctctctggctaactagagaacccactgcttactggcttatcgaaattaatacgactcactatagggag
acccaagctggATGTTTGTGTTCCTGGTGCTGCTGCCACTGGTGTCCAGCCAGTGTGTGAACCTGACC
ACCAGGACCCAACTTCCTCCTGCCTACACCAACTCCTTCACCAGGGGAGTCTACTACCCTGACAAGGT
GTTCAGGTCCTCTGTGCTGCACAGCACCCAGGACCTGTTCCTGCCATTCTTCAGCAATGTGACCTGGT
TCCATGCCATCCATGTGTCTGGCACCAATGGCACCAAGAGGTTTGACAACCCTGTGCTGCCATTCAAT
GATGGAGTCTACTTTGCCAGCACAGAGAAGAGCAACATCATCAGGGGCTGGATTTTTGGCACCACCCT
GGACAGCAAGACCCAGTCCCTGCTGATTGTGAACAATGCCACCAATGTGGTGATTAAGGTGTGTGAGT
TCCAGTTCTGTAATGACCCATTCCTGGGAGTCTACTACCACAAGAACAACAAGTCCTGGATGGAGTCT
GAGTTCAGGGTCTACTCCTCTGCCAACAACTGTACCTTTGAATATGTGAGCCAACCATTCCTGATGGA
CTTGGAGGGCAAGCAGGGCAACTTCAAGAACCTGAGGGAGTTTGTGTTCAAGAACATTGATGGCTACT
TCAAGATTTACAGCAAACACACACCAATCAACCTGGTGAGGGACCTGCCACAGGGCTTCTCTGCCTTG
GAACCACTGGTGGACCTGCCAATTGGCATCAACATCACCAGGTTCCAGACCCTGCTGGCTCTGCACAG
GTCCTACCTGACACCTGGAGACTCCTCCTCTGGCTGGACAGCAGGAGCAGCAGCCTACTATGTGGGCT
ACCTCCAACCAAGGACCTTCCTGCTGAAATACAATGAGAATGGCACCATCACAGATGCTGAGGGCAAG
CAGGGCAACTTCAAGAACCTGAGGGAGTTTGTGTTCAAGAACATTGATGGCTACTTCAAGATTTACAG
CAAACACACACCAATCAACCTGGTGAGGGACCTGCCACAGGGCTTCTCTGCCTTGGAACCACTGGTGG
ACCTGCCAATTGGCATCAACATCACCAGGTTCCAGACCCTGCTGGCTCTGCACAGGTCCTACCTGACA
CCTGGAGACTCCTCCTCTGGCTGGACAGCAGGAGCAGCAGCCTACTATGTGGGCTACCTCCAACCAAG
GACCTTCCTGCTGAAATACAATGAGAATGGCACCATCACAGATGCTGTGGACTGTGCCCTGGACCCAC
TGTCTGAGACCAAGTGTACCCTGAAATCCTTCACAGTGGAGAAGGGCATCTACCAGACCAGCAACTTC
AGGGTCCAACCAACAGAGAGCATTGTGAGGTTTCCAAACATCACCAACCTGTGTCCATTTGGAGAGGT
GTTCAATGCCACCAGGTTTGCCTCTGTCTATGCCTGGAACAGGAAGAGGATTAGCAACTGTGTGGCTG
ACTACTCTGTGCTCTACAACTCTGCCTCCTTCAGCACCTTCAAGTGTTATGGAGTGAGCCCAACCAAA
CTGAATGACCTGTGTTTCACCAATGTCTATGCTGACTCCTTTGTGATTAGGGGAGATGAGGTGAGACA
GATTGCCCCTGGACAAACAGGCgccATTGCTGACTACAACTACAAACTGCCTGATGACTTCACAGGCT
GTGTGATTGCCTGGAACAGCAACAACCTGGACAGCAAGGTGGGAGGCAACTACAACTACCTCTACAGA
gccgctAGGAAGAGCAACCTGAAACCATTTGAGAGGGACATCAGCACAGAGATTgccCAGGCTGGCAG
CACACCATGTAATGGAGTGGAGGGCTTCAACTGTTACTTTCCACTCgccTCCTATGGCTTCCAACCAA
CCAATGGAGTGGGCTACCAACCATACAGGGTGGTGGTGCTGTCCTTTGAACTGCTCCATGCCCCTGCC
ACAGTGTGTGGACCAAAGAAGAGCACCAACCTGGTGAAGAACAAGTGTGTGAACTTCAACgccAATGG
ACTGACAGGCACAGGAGTGCTGACAGAGAGCAACAAGAAGTTCCTGCCATTCCAACAGTTTGGCAGGG
ACATTGCTGACACCACAGATGCTGTGAGGGACCCACAGACCTTGGAGATTCTGGACATCACACCATGT
TCCTTTGGAGGAGTGTCTGTGATTACACCTGGCACCAACACCAGCAACCAGGTGGCTGTGCTCTACCA
GGATGTGAACTGTACTGAGGTGCCTGTGGCTATCCATGCTGACCAACTTACACCAACCTGGAGGGTCT
ACAGCACAGGCAGCAATGTGTTCCAGACCAGGGCTGGCTGTCTGATTGGAGCAGAGCATGTGAACAAC
TCCTATGAGTGTGACATCCCAATTGGAGCAGGCATCTGTGCCTCCTACCAGACCCAGACCAACAGCCC
AAGGAGGGCAAGGTCTGTGGCAAGCCAGAGCATCATTGCCTACACAATGAGTCTGGGAGCAGAGAACT
CTGTGGCTTACAGCAACAACAGCATTGCCATCCCAACCAACTTCACCATCTCTGTGACCACAGAGATT
CTGCCTGTGAGTATGACCAAGACCTCTGTGGACTGTACAATGTATATCTGTGGAGACAGCACAGAGTG
TAGCAACCTGCTGCTCCAATATGGCTCCTTCTGTACCCAACTTAACAGGGCTCTGACAGGCATTGCTG
TGGAACAGGACAAGAACACCCAGGAGGTGTTTGCCCAGGTGAAGCAGATTTACAAGACACCTCCAATC
AAGGACTTTGGAGGCTTCAACTTCAGCCAGATTCTGCCTGACCCAAGCAAGCCAAGCAAGAGGTCCTT
CATTGAGGACCTGCTGTTCAACAAGGTGACCCTGGCTGATGCTGGCTTCATCAAGCAATATGGAGACT
GTCTGGGAGACATTGCTGCCAGGGACCTGATTTGTGCCCAGAAGTTCAATGGACTGACAGTGCTGCCT
CCACTGCTGACAGATGAGATGATTGCCCAATACACCTCTGCCCTGCTGGCTGGCACCATCACCTCTGG
CTGGACCTTTGGAGCAGGAGCAGCCCTCCAAATCCCATTTGCTATGCAGATGGCTTACAGGTTCAATG
GCATTGGAGTGACCCAGAATGTGCTCTATGAGAACCAGAAACTGATTGCCAACCAGTTCAACTCTGCC
ATTGGCAAGATTCAGGACTCCCTGTCCAGCACAGCCTCTGCCCTGGGCAAACTCCAAGATGTGGTGAA
CCAGAATGCCCAGGCTCTGAACACCCTGGTGAAGCAACTTTCCAGCAACTTTGGAGCCATCTCCTCTG
TGCTGAATGACATCCTGAGCAGACTGGACcctcccGAGGCTGAGGTCCAGATTGACAGACTGATTACA
GGCAGACTCCAATCCCTCCAAACCTATGTGACCCAACAACTTATCAGGGCTGCTGAGATTAGGGCATC
TGCCAACCTGGCTGCCACCAAGATGAGTGAGTGTGTGCTGGGACAAAGCAAGAGGGTGGACTTCTGTG
GCAAGGGCTACCACCTGATGAGTTTTCCACAGTCTGCCCCTCATGGAGTGGTGTTCCTGCATGTGACC
TATGTGCCTGCCCAGGAGAAGAACTTCACCACAGCCCCTGCCATCTGCCATGATGGCAAGGCTCACTT
TCCAAGGGAGGGAGTGTTTGTGAGCAATGGCACCCACTGGTTTGTGACCCAGAGGAACTTCTATGAAC
CACAGATTATCACCACAGACAACACCTTTGTGTCTGGCAACTGTGATGTGGTGATTGGCATTGTGAAC
AACACAGTCTATGACCCACTCCAACCTGAACTGGACTCCTTCAAGGAGGAACTGGACAAATACTTCAA
GAACCACACCAGCCCTGATGTGGACCTGGGAGACATCTCTGGCATCAATGCCTCTGTGGTGAACATCC
AGAAGGAGATTGACAGACTGAATGAGGTGGCTAAGAACCTGAATGAGTCCCTGATTGACCTCCAAGAA
CTGGGCAAAtaagtttaaacccgctgatcagcctcgactgtgccttctagttgccagccatctgttgt
ttgcccctcccccgtgccttccttgaccctggaaggtgccactcccactgtcctttcctaataaaatg
aggaaattgcatcgcattgtctgagtaggtgtcattctattctggggggtggggtggggcaggacagc
aagggggaggattgggaagacaatagcaggcatgctggggatgcggtgggctctatggcttctgaggc
ggaaagaaccagctggggctctagggggtatccccacgcgccctgtagcggcgcattaagcgcggcgg
gtgtggtggttacgcgcagcgtgaccgctacacttgccagcgccctagcgcccgctcctttcgctttc
ttcccttcctttctcgccacgttcgccggctttccccgtcaagctctaaatcgggggctccctttagg
gttccgatttagtgctttacggcacctcgaccccaaaaaacttgattagggtgatggttcacgtagtg
ggccatcgccctgatagacggtttttcgccctttgacgttggagtccacgttctttaatagtggactc
ttgttccaaactggaacaacactcaaccctatctcggtctattcttttgatttataagggattttgcc
gatttcggcctattggttaaaaaatgagctgatttaacaaaaatttaacgcgaattaattctgtggaa
tgtgtgtcagttagggtgtggaaagtccccaggctccccagcaggcagaagtatgcaaagcatgcatc
tcaattagtcagcaaccaggtgtggaaagtccccaggctccccagcaggcagaagtatgcaaagcatg
catctcaattagtcagcaaccatagtcccgcccctaactccgcccatcccgcccctaactccgcccag
ttccgcccattctccgccccatggctgactaattttttttatttatgcagaggccgaggccgcctctg
cctctgagctattccagaagtagtgaggaggcttttttggaggcctaggcttttgcaaaaagctcccg
ggagcttgtatatccattttcggatctgatcaagagacaggatgaggatcgtttcgcatgattgaaca
agatggattgcacgcaggttctccggccgcttgggtggagaggctattcggctatgactgggcacaac
agacaatcggctgctctgatgccgccgtgttccggctgtcagcgcaggggcgcccggttctttttgtc
aagaccgacctgtccggtgccctgaatgaactgcaggacgaggcagcgcggctatcgtggctggccac
gacgggcgttccttgcgcagctgtgctcgacgttgtcactgaagcgggaagggactggctgctattgg
gcgaagtgccggggcaggatctcctgtcatctcaccttgctcctgccgagaaagtatccatcatggct
gatgcaatgcggcggctgcatacgcttgatccggctacctgcccattcgaccaccaagcgaaacatcg
catcgagcgagcacgtactcggatggaagccggtcttgtcgatcaggatgatctggacgaagagcatc
aggggctcgcgccagccgaactgttcgccaggctcaaggcgcgcatgcccgacggcgaggatctcgtc
gtgacccatggcgatgcctgcttgccgaatatcatggtggaaaatggccgcttttctggattcatcga
ctgtggccggctgggtgtggcggaccgctatcaggacatagcgttggctacccgtgatattgctgaag
agcttggcggcgaatgggctgaccgcttcctcgtgctttacggtatcgccgctcccgattcgcagcgc
atcgccttctatcgccttcttgacgagttcttctgagcgggactctggggttcgaaatgaccgaccaa
gcgacgcccaacctgccatcacgagatttcgattccaccgccgccttctatgaaaggttgggcttcgg
aatcgttttccgggacgccggctggatgatcctccagcgcggggatctcatgctggagttcttcgccc
accccaacttgtttattgcagcttataatggttacaaataaagcaatagcatcacaaatttcacaaat
aaagcatttttttcactgcattctagttgtggtttgtccaaactcatcaatgtatcttatcatgtctg
tataccgtcgacctctagctagagcttggcgtaatcatggtcatagctgtttcctgtgtgaaattgtt
atccgctcacaattccacacaacatacgagccggaagcataaagtgtaaagcctggggtgcctaatga
gtgagctaactcacattaattgcgttgcgctcactgcccgctttccagtcgggaaacctgtcgtgcca
gctgcattaatgaatcggccaacgcgcggggagaggcggtttgcgtattgggcgctcttccgcttcct
cgctcactgactcgctgcgctcggtcgttcggctgcggcgagcggtatcagctcactcaaaggcggta
atacggttatccacagaatcaggggataacgcaggaaagaacatgtgagcaaaaggccagcaaaaggc
caggaaccgtaaaaaggccgcgttgctggcgtttttccataggctccgcccccctgacgagcatcaca
aaaatcgacgctcaagtcagaggtggcgaaacccgacaggactataaagataccaggcgtttccccct
ggaagctccctcgtgcgctctcctgttccgaccctgccgcttaccggatacctgtccgcctttctccc
ttcgggaagcgtggcgctttctcatagctcacgctgtaggtatctcagttcggtgtaggtcgttcgct
ccaagctgggctgtgtgcacgaaccccccgttcagcccgaccgctgcgccttatccggtaactatcgt
cttgagtccaacccggtaagacacgacttatcgccactggcagcagccactggtaacaggattagcag
agcgaggtatgtaggcggtgctacagagttcttgaagtggtggcctaactacggctacactagaagaa
cagtatttggtatctgcgctctgctgaagccagttaccttcggaaaaagagttggtagctcttgatcc
ggcaaacaaaccaccgctggtagcggtttttttgtttgcaagcagcagattacgcgcagaaaaaaagg
atctcaagaagatcctttgatcttttctacggggtctgacgctcagtggaacgaaaactcacgttaag
ggattttggtcatgagattatcaaaaaggatcttcacctagatccttttaaattaaaaatgaagtttt
aaatcaatctaaagtatatatgagtaaacttggtctgacagttaccaatgcttaatcagtgaggcacc
tatctcagcgatctgtctatttcgttcatccatagttgcctgactccccgtcgtgtagataactacga
tacgggagggcttaccatctggccccagtgctgcaatgataccgcgagacccacgctcaccggctcca
gatttatcagcaataaaccagccagccggaagggccgagcgcagaagtggtcctgcaactttatccgc
ctccatccagtctattaattgttgccgggaagctagagtaagtagttcgccagttaatagtttgcgca
acgttgttgccattgctacaggcatcgtggtgtcacgctcgtcgtttggtatggcttcattcagctcc
ggttcccaacgatcaaggcgagttacatgatcccccatgttgtgcaaaaaagcggttagctccttcgg
tcctccgatcgttgtcagaagtaagttggccgcagtgttatcactcatggttatggcagcactgcata
attctcttactgtcatgccatccgtaagatgcttttctgtgactggtgagtactcaaccaagtcattc
tgagaatagtgtatgcggcgaccgagttgctcttgcccggcgtcaatacgggataataccgcgccaca
tagcagaactttaaaagtgctcatcattggaaaacgttcttcggggcgaaaactctcaaggatcttac
cgctgttgagatccagttcgatgtaacccactcgtgcacccaactgatcttcagcatcttttactttc
accagcgtttctgggtgagcaaaaacaggaaggcaaaatgccgcaaaaaagggaataagggcgacacg
gaaatgttgaatactcatactcttcctttttcaatattattgaagcatttatcagggttattgtctca
tgagcggatacatatttgaatgtatttagaaaaataaacaaataggggttccgcgcacatttccccga
aaagtgccacctgacgtc
pMD133_pcDNA3.1_SARS-CoV-2_stabilized-S-protein_mut_v3
SEQ ID NO: 110
gacggatcgggagatctcccgatcccctatggtgcactctcagtacaatctgctctgatgccgcatag
ttaagccagtatctgctccctgcttgtgtgttggaggtcgctgagtagtgcgcgagcaaaatttaagc
tacaacaaggcaaggcttgaccgacaattgcatgaagaatctgcttagggttaggcgttttgcgctgc
ttcgcgatgtacgggccagatatacgcgttgacattgattattgactagttattaatagtaatcaatt
acggggtcattagttcatagcccatatatggagttccgcgttacataacttacggtaaatggcccgcc
tggctgaccgcccaacgacccccgcccattgacgtcaataatgacgtatgttcccatagtaacgccaa
tagggactttccattgacgtcaatgggtggagtatttacggtaaactgcccacttggcagtacatcaa
gtgtatcatatgccaagtacgccccctattgacgtcaatgacggtaaatggcccgcctggcattatgc
ccagtacatgaccttatgggactttcctacttggcagtacatctacgtattagtcatcgctattacca
tggtgatgcggttttggcagtacatcaatgggcgtggatagcggtttgactcacggggatttccaagt
ctccaccccattgacgtcaatgggagtttgttttggcaccaaaatcaacgggactttccaaaatgtcg
taacaactccgccccattgacgcaaatgggcggtaggcgtgtacggtgggaggtctatataagcagag
ctctctggctaactagagaacccactgcttactggcttatcgaaattaatacgactcactatagggag
acccaagctggATGTTTGTGTTCCTGGTGCTGCTGCCACTGGTGTCCAGCCAGTGTGTGAACCTGACC
ACCAGGACCCAACTTCCTCCTGCCTACACCAACTCCTTCACCAGGGGAGTCTACTACCCTGACAAGGT
GTTCAGGTCCTCTGTGCTGCACAGCACCCAGGACCTGTTCCTGCCATTCTTCAGCAATGTGACCTGGT
TCCATGCCATCCATGTGTCTGGCACCAATGGCACCAAGAGGTTTGACAACCCTGTGCTGCCATTCAAT
GATGGAGTCTACTTTGCCAGCACAGAGAAGAGCAACATCATCAGGGGCTGGATTTTTGGCACCACCCT
GGACAGCAAGACCCAGTCCCTGCTGATTGTGAACAATGCCACCAATGTGGTGATTAAGGTGTGTGAGT
TCCAGTTCTGTAATGACCCATTCCTGGGAGTCTACTACCACAAGAACAACAAGTCCTGGATGGAGTCT
GAGTTCAGGGTCTACTCCTCTGCCAACAACTGTACCTTTGAATATGTGAGCCAACCATTCCTGATGGA
CTTGGAGGGCAAGCAGGGCAACTTCAAGAACCTGAGGGAGTTTGTGTTCAAGAACATTGATGGCTACT
TCAAGATTTACAGCAAACACACACCAATCAACCTGGTGAGGGACCTGCCACAGGGCTTCTCTGCCTTG
GAACCACTGGTGGACCTGCCAATTGGCATCAACATCACCAGGTTCCAGACCCTGCTGGCTCTGCACAG
GTCCTACCTGACACCTGGAGACTCCTCCTCTGGCTGGACAGCAGGAGCAGCAGCCTACTATGTGGGCT
ACCTCCAACCAAGGACCTTCCTGCTGAAATACAATGAGAATGGCACCATCACAGATGCTGAGGGCAAG
CAGGGCAACTTCAAGAACCTGAGGGAGTTTGTGTTCAAGAACATTGATGGCTACTTCAAGATTTACAG
CAAACACACACCAATCAACCTGGTGAGGGACCTGCCACAGGGCTTCTCTGCCTTGGAACCACTGGTGG
ACCTGCCAATTGGCATCAACATCACCAGGTTCCAGACCCTGCTGGCTCTGCACAGGTCCTACCTGACA
CCTGGAGACTCCTCCTCTGGCTGGACAGCAGGAGCAGCAGCCTACTATGTGGGCTACCTCCAACCAAG
GACCTTCCTGCTGAAATACAATGAGAATGGCACCATCACAGATGCTGTGGACTGTGCCCTGGACCCAC
TGTCTGAGACCAAGTGTACCCTGAAATCCTTCACAGTGGAGAAGGGCATCTACCAGACCAGCAACTTC
AGGGTCCAACCAACAGAGAGCATTGTGAGGTTTCCAAACATCACCAACCTGTGTCCATTTGGAGAGGT
GTTCAATGCCACCAGGTTTGCCTCTGTCTATGCCTGGAACAGGAAGAGGATTAGCAACTGTGTGGCTG
ACTACTCTGTGCTCTACAACTCTGCCTCCTTCAGCACCTTCAAGTGTTATGGAGTGAGCCCAACCAAA
CTGAATGACCTGTGTTTCACCAATGTCTATGCTGACTCCTTTGTGATTAGGGGAGATGAGGTGAGACA
GATTGCCCCTGGACAAACAGGCAAGATTGCTGACTACAACTACAAACTGCCTGATGACTTCACAGGCT
GTGTGATTGCCTGGAACAGCAACAACCTGGACAGCAAGGTGGGAGGCAACTACAACTACCTCTACAGA
CTGTTCAGGAAGAGCAACCTGAAACCATTTGAGAGGGACATCAGCACAGAGATTTACgctGCTGGCAG
CACACCATGTAATGGAGTGGAGGGCgccgctTGTTACTTTCCACTCCAATCCTATGGCTTCCAACCAA
CCAATGGAGTGGGCTACCAACCATACAGGGTGGTGGTGCTGTCCTTTGAACTGCTCCATGCCCCTGCC
ACAGTGTGTGGACCAAAGAAGAGCACCAACCTGGTGAAGAACAAGTGTGTGAACTTCAACTTCAATGG
ACTGACAGGCACAGGAGTGCTGACAGAGAGCAACAAGAAGTTCCTGCCATTCCAACAGTTTGGCAGGG
ACATTGCTGACACCACAGATGCTGTGAGGGACCCACAGACCTTGGAGATTCTGGACATCACACCATGT
TCCTTTGGAGGAGTGTCTGTGATTACACCTGGCACCAACACCAGCAACCAGGTGGCTGTGCTCTACCA
GGATGTGAACTGTACTGAGGTGCCTGTGGCTATCCATGCTGACCAACTTACACCAACCTGGAGGGTCT
ACAGCACAGGCAGCAATGTGTTCCAGACCAGGGCTGGCTGTCTGATTGGAGCAGAGCATGTGAACAAC
TCCTATGAGTGTGACATCCCAATTGGAGCAGGCATCTGTGCCTCCTACCAGACCCAGACCAACAGCCC
AAGGAGGGCAAGGTCTGTGGCAAGCCAGAGCATCATTGCCTACACAATGAGTCTGGGAGCAGAGAACT
CTGTGGCTTACAGCAACAACAGCATTGCCATCCCAACCAACTTCACCATCTCTGTGACCACAGAGATT
CTGCCTGTGAGTATGACCAAGACCTCTGTGGACTGTACAATGTATATCTGTGGAGACAGCACAGAGTG
TAGCAACCTGCTGCTCCAATATGGCTCCTTCTGTACCCAACTTAACAGGGCTCTGACAGGCATTGCTG
TGGAACAGGACAAGAACACCCAGGAGGTGTTTGCCCAGGTGAAGCAGATTTACAAGACACCTCCAATC
AAGGACTTTGGAGGCTTCAACTTCAGCCAGATTCTGCCTGACCCAAGCAAGCCAAGCAAGAGGTCCTT
CATTGAGGACCTGCTGTTCAACAAGGTGACCCTGGCTGATGCTGGCTTCATCAAGCAATATGGAGACT
GTCTGGGAGACATTGCTGCCAGGGACCTGATTTGTGCCCAGAAGTTCAATGGACTGACAGTGCTGCCT
CCACTGCTGACAGATGAGATGATTGCCCAATACACCTCTGCCCTGCTGGCTGGCACCATCACCTCTGG
CTGGACCTTTGGAGCAGGAGCAGCCCTCCAAATCCCATTTGCTATGCAGATGGCTTACAGGTTCAATG
GCATTGGAGTGACCCAGAATGTGCTCTATGAGAACCAGAAACTGATTGCCAACCAGTTCAACTCTGCC
ATTGGCAAGATTCAGGACTCCCTGTCCAGCACAGCCTCTGCCCTGGGCAAACTCCAAGATGTGGTGAA
CCAGAATGCCCAGGCTCTGAACACCCTGGTGAAGCAACTTTCCAGCAACTTTGGAGCCATCTCCTCTG
TGCTGAATGACATCCTGAGCAGACTGGACcctcccGAGGCTGAGGTCCAGATTGACAGACTGATTACA
GGCAGACTCCAATCCCTCCAAACCTATGTGACCCAACAACTTATCAGGGCTGCTGAGATTAGGGCATC
TGCCAACCTGGCTGCCACCAAGATGAGTGAGTGTGTGCTGGGACAAAGCAAGAGGGTGGACTTCTGTG
GCAAGGGCTACCACCTGATGAGTTTTCCACAGTCTGCCCCTCATGGAGTGGTGTTCCTGCATGTGACC
TATGTGCCTGCCCAGGAGAAGAACTTCACCACAGCCCCTGCCATCTGCCATGATGGCAAGGCTCACTT
TCCAAGGGAGGGAGTGTTTGTGAGCAATGGCACCCACTGGTTTGTGACCCAGAGGAACTTCTATGAAC
CACAGATTATCACCACAGACAACACCTTTGTGTCTGGCAACTGTGATGTGGTGATTGGCATTGTGAAC
AACACAGTCTATGACCCACTCCAACCTGAACTGGACTCCTTCAAGGAGGAACTGGACAAATACTTCAA
GAACCACACCAGCCCTGATGTGGACCTGGGAGACATCTCTGGCATCAATGCCTCTGTGGTGAACATCC
AGAAGGAGATTGACAGACTGAATGAGGTGGCTAAGAACCTGAATGAGTCCCTGATTGACCTCCAAGAA
CTGGGCAAAtaagtttaaacccgctgatcagcctcgactgtgccttctagttgccagccatctgttgt
ttgcccctcccccgtgccttccttgaccctggaaggtgccactcccactgtcctttcctaataaaatg
aggaaattgcatcgcattgtctgagtaggtgtcattctattctggggggtggggtggggcaggacagc
aagggggaggattgggaagacaatagcaggcatgctggggatgcggtgggctctatggcttctgaggc
ggaaagaaccagctggggctctagggggtatccccacgcgccctgtagcggcgcattaagcgcggcgg
gtgtggtggttacgcgcagcgtgaccgctacacttgccagcgccctagcgcccgctcctttcgctttc
ttcccttcctttctcgccacgttcgccggctttccccgtcaagctctaaatcgggggctccctttagg
gttccgatttagtgctttacggcacctcgaccccaaaaaacttgattagggtgatggttcacgtagtg
ggccatcgccctgatagacggtttttcgccctttgacgttggagtccacgttctttaatagtggactc
ttgttccaaactggaacaacactcaaccctatctcggtctattcttttgatttataagggattttgcc
gatttcggcctattggttaaaaaatgagctgatttaacaaaaatttaacgcgaattaattctgtggaa
tgtgtgtcagttagggtgtggaaagtccccaggctccccagcaggcagaagtatgcaaagcatgcatc
tcaattagtcagcaaccaggtgtggaaagtccccaggctccccagcaggcagaagtatgcaaagcatg
catctcaattagtcagcaaccatagtcccgcccctaactccgcccatcccgcccctaactccgcccag
ttccgcccattctccgccccatggctgactaattttttttatttatgcagaggccgaggccgcctctg
cctctgagctattccagaagtagtgaggaggcttttttggaggcctaggcttttgcaaaaagctcccg
ggagcttgtatatccattttcggatctgatcaagagacaggatgaggatcgtttcgcatgattgaaca
agatggattgcacgcaggttctccggccgcttgggtggagaggctattcggctatgactgggcacaac
agacaatcggctgctctgatgccgccgtgttccggctgtcagcgcaggggcgcccggttctttttgtc
aagaccgacctgtccggtgccctgaatgaactgcaggacgaggcagcgcggctatcgtggctggccac
gacgggcgttccttgcgcagctgtgctcgacgttgtcactgaagcgggaagggactggctgctattgg
gcgaagtgccggggcaggatctcctgtcatctcaccttgctcctgccgagaaagtatccatcatggct
gatgcaatgcggcggctgcatacgcttgatccggctacctgcccattcgaccaccaagcgaaacatcg
catcgagcgagcacgtactcggatggaagccggtcttgtcgatcaggatgatctggacgaagagcatc
aggggctcgcgccagccgaactgttcgccaggctcaaggcgcgcatgcccgacggcgaggatctcgtc
gtgacccatggcgatgcctgcttgccgaatatcatggtggaaaatggccgcttttctggattcatcga
ctgtggccggctgggtgtggcggaccgctatcaggacatagcgttggctacccgtgatattgctgaag
agcttggcggcgaatgggctgaccgcttcctcgtgctttacggtatcgccgctcccgattcgcagcgc
atcgccttctatcgccttcttgacgagttcttctgagcgggactctggggttcgaaatgaccgaccaa
gcgacgcccaacctgccatcacgagatttcgattccaccgccgccttctatgaaaggttgggcttcgg
aatcgttttccgggacgccggctggatgatcctccagcgcggggatctcatgctggagttcttcgccc
accccaacttgtttattgcagcttataatggttacaaataaagcaatagcatcacaaatttcacaaat
aaagcatttttttcactgcattctagttgtggtttgtccaaactcatcaatgtatcttatcatgtctg
tataccgtcgacctctagctagagcttggcgtaatcatggtcatagctgtttcctgtgtgaaattgtt
atccgctcacaattccacacaacatacgagccggaagcataaagtgtaaagcctggggtgcctaatga
gtgagctaactcacattaattgcgttgcgctcactgcccgctttccagtcgggaaacctgtcgtgcca
gctgcattaatgaatcggccaacgcgcggggagaggcggtttgcgtattgggcgctcttccgcttcct
cgctcactgactcgctgcgctcggtcgttcggctgcggcgagcggtatcagctcactcaaaggcggta
atacggttatccacagaatcaggggataacgcaggaaagaacatgtgagcaaaaggccagcaaaaggc
caggaaccgtaaaaaggccgcgttgctggcgtttttccataggctccgcccccctgacgagcatcaca
aaaatcgacgctcaagtcagaggtggcgaaacccgacaggactataaagataccaggcgtttccccct
ggaagctccctcgtgcgctctcctgttccgaccctgccgcttaccggatacctgtccgcctttctccc
ttcgggaagcgtggcgctttctcatagctcacgctgtaggtatctcagttcggtgtaggtcgttcgct
ccaagctgggctgtgtgcacgaaccccccgttcagcccgaccgctgcgccttatccggtaactatcgt
cttgagtccaacccggtaagacacgacttatcgccactggcagcagccactggtaacaggattagcag
agcgaggtatgtaggcggtgctacagagttcttgaagtggtggcctaactacggctacactagaagaa
cagtatttggtatctgcgctctgctgaagccagttaccttcggaaaaagagttggtagctcttgatcc
ggcaaacaaaccaccgctggtagcggtttttttgtttgcaagcagcagattacgcgcagaaaaaaagg
atctcaagaagatcctttgatcttttctacggggtctgacgctcagtggaacgaaaactcacgttaag
ggattttggtcatgagattatcaaaaaggatcttcacctagatccttttaaattaaaaatgaagtttt
aaatcaatctaaagtatatatgagtaaacttggtctgacagttaccaatgcttaatcagtgaggcacc
tatctcagcgatctgtctatttcgttcatccatagttgcctgactccccgtcgtgtagataactacga
tacgggagggcttaccatctggccccagtgctgcaatgataccgcgagacccacgctcaccggctcca
gatttatcagcaataaaccagccagccggaagggccgagcgcagaagtggtcctgcaactttatccgc
ctccatccagtctattaattgttgccgggaagctagagtaagtagttcgccagttaatagtttgcgca
acgttgttgccattgctacaggcatcgtggtgtcacgctcgtcgtttggtatggcttcattcagctcc
ggttcccaacgatcaaggcgagttacatgatcccccatgttgtgcaaaaaagcggttagctccttcgg
tcctccgatcgttgtcagaagtaagttggccgcagtgttatcactcatggttatggcagcactgcata
attctcttactgtcatgccatccgtaagatgcttttctgtgactggtgagtactcaaccaagtcattc
tgagaatagtgtatgcggcgaccgagttgctcttgcccggcgtcaatacgggataataccgcgccaca
tagcagaactttaaaagtgctcatcattggaaaacgttcttcggggcgaaaactctcaaggatcttac
cgctgttgagatccagttcgatgtaacccactcgtgcacccaactgatcttcagcatcttttactttc
accagcgtttctgggtgagcaaaaacaggaaggcaaaatgccgcaaaaaagggaataagggcgacacg
gaaatgttgaatactcatactcttcctttttcaatattattgaagcatttatcagggttattgtctca
tgagcggatacatatttgaatgtatttagaaaaataaacaaataggggttccgcgcacatttccccga
aaagtgccacctgacgtc
pMD134_pcDNA3.1_SARS-CoV-2_stabilized-S-protein_mut_v4
SEQ ID NO: 111
gacggatcgggagatctcccgatcccctatggtgcactctcagtacaatctgctctgatgccgcatag
ttaagccagtatctgctccctgcttgtgtgttggaggtcgctgagtagtgcgcgagcaaaatttaagc
tacaacaaggcaaggcttgaccgacaattgcatgaagaatctgcttagggttaggcgttttgcgctgc
ttcgcgatgtacgggccagatatacgcgttgacattgattattgactagttattaatagtaatcaatt
acggggtcattagttcatagcccatatatggagttccgcgttacataacttacggtaaatggcccgcc
tggctgaccgcccaacgacccccgcccattgacgtcaataatgacgtatgttcccatagtaacgccaa
tagggactttccattgacgtcaatgggtggagtatttacggtaaactgcccacttggcagtacatcaa
gtgtatcatatgccaagtacgccccctattgacgtcaatgacggtaaatggcccgcctggcattatgc
ccagtacatgaccttatgggactttcctacttggcagtacatctacgtattagtcatcgctattacca
tggtgatgcggttttggcagtacatcaatgggcgtggatagcggtttgactcacggggatttccaagt
ctccaccccattgacgtcaatgggagtttgttttggcaccaaaatcaacgggactttccaaaatgtcg
taacaactccgccccattgacgcaaatgggcggtaggcgtgtacggtgggaggtctatataagcagag
ctctctggctaactagagaacccactgcttactggcttatcgaaattaatacgactcactatagggag
acccaagctggATGTTTGTGTTCCTGGTGCTGCTGCCACTGGTGTCCAGCCAGTGTGTGAACCTGACC
ACCAGGACCCAACTTCCTCCTGCCTACACCAACTCCTTCACCAGGGGAGTCTACTACCCTGACAAGGT
GTTCAGGTCCTCTGTGCTGCACAGCACCCAGGACCTGTTCCTGCCATTCTTCAGCAATGTGACCTGGT
TCCATGCCATCCATGTGTCTGGCACCAATGGCACCAAGAGGTTTGACAACCCTGTGCTGCCATTCAAT
GATGGAGTCTACTTTGCCAGCACAGAGAAGAGCAACATCATCAGGGGCTGGATTTTTGGCACCACCCT
GGACAGCAAGACCCAGTCCCTGCTGATTGTGAACAATGCCACCAATGTGGTGATTAAGGTGTGTGAGT
TCCAGTTCTGTAATGACCCATTCCTGGGAGTCTACTACCACAAGAACAACAAGTCCTGGATGGAGTCT
GAGTTCAGGGTCTACTCCTCTGCCAACAACTGTACCTTTGAATATGTGAGCCAACCATTCCTGATGGA
CTTGGAGGGCAAGCAGGGCAACTTCAAGAACCTGAGGGAGTTTGTGTTCAAGAACATTGATGGCTACT
TCAAGATTTACAGCAAACACACACCAATCAACCTGGTGAGGGACCTGCCACAGGGCTTCTCTGCCTTG
GAACCACTGGTGGACCTGCCAATTGGCATCAACATCACCAGGTTCCAGACCCTGCTGGCTCTGCACAG
GTCCTACCTGACACCTGGAGACTCCTCCTCTGGCTGGACAGCAGGAGCAGCAGCCTACTATGTGGGCT
ACCTCCAACCAAGGACCTTCCTGCTGAAATACAATGAGAATGGCACCATCACAGATGCTGAGGGCAAG
CAGGGCAACTTCAAGAACCTGAGGGAGTTTGTGTTCAAGAACATTGATGGCTACTTCAAGATTTACAG
CAAACACACACCAATCAACCTGGTGAGGGACCTGCCACAGGGCTTCTCTGCCTTGGAACCACTGGTGG
ACCTGCCAATTGGCATCAACATCACCAGGTTCCAGACCCTGCTGGCTCTGCACAGGTCCTACCTGACA
CCTGGAGACTCCTCCTCTGGCTGGACAGCAGGAGCAGCAGCCTACTATGTGGGCTACCTCCAACCAAG
GACCTTCCTGCTGAAATACAATGAGAATGGCACCATCACAGATGCTGTGGACTGTGCCCTGGACCCAC
TGTCTGAGACCAAGTGTACCCTGAAATCCTTCACAGTGGAGAAGGGCATCTACCAGACCAGCAACTTC
AGGGTCCAACCAACAGAGAGCATTGTGAGGTTTCCAAACATCACCAACCTGTGTCCATTTGGAGAGGT
GTTCAATGCCACCAGGTTTGCCTCTGTCTATGCCTGGAACAGGAAGAGGATTAGCAACTGTGTGGCTG
ACTACTCTGTGCTCTACAACTCTGCCTCCTTCAGCACCTTCAAGTGTTATGGAGTGAGCCCAACCAAA
CTGAATGACCTGTGTTTCACCAATGTCTATGCTGACTCCTTTGTGATTAGGGGAGATGAGGTGAGACA
GATTGCCCCTGGACAAACAGGCgccATTGCTGACTACAACTACAAACTGCCTGATGACTTCACAGGCT
GTGTGATTGCCTGGAACAGCgccAACCTGGACAGCAAGGTGGGAGGCAACgccAACTACCTCTACAGA
gccgctAGGAAGAGCAACCTGAAACCATTTGAGAGGGACATCAGCACAGAGATTgccgctGCTGGCAG
CACACCATGTAATGGAGTGGAGGGCgccgctTGTTACTTTCCACTCgccTCCTATGGCTTCgccCCAg
ctgccGGAGTGGGCTACCAACCATACAGGGTGGTGGTGCTGTCCTTTGAACTGCTCCATGCCCCTGCC
ACAGTGTGTGGACCAAAGAAGAGCACCAACCTGGTGAAGAACAAGTGTGTGAACTTCAACgccAATGG
ACTGACAGGCACAGGAGTGCTGACAGAGAGCAACAAGAAGTTCCTGCCATTCCAACAGTTTGGCAGGG
ACATTGCTGACACCACAGATGCTGTGAGGGACCCACAGACCTTGGAGATTCTGGACATCACACCATGT
TCCTTTGGAGGAGTGTCTGTGATTACACCTGGCACCAACACCAGCAACCAGGTGGCTGTGCTCTACCA
GGATGTGAACTGTACTGAGGTGCCTGTGGCTATCCATGCTGACCAACTTACACCAACCTGGAGGGTCT
ACAGCACAGGCAGCAATGTGTTCCAGACCAGGGCTGGCTGTCTGATTGGAGCAGAGCATGTGAACAAC
TCCTATGAGTGTGACATCCCAATTGGAGCAGGCATCTGTGCCTCCTACCAGACCCAGACCAACAGCCC
AAGGAGGGCAAGGTCTGTGGCAAGCCAGAGCATCATTGCCTACACAATGAGTCTGGGAGCAGAGAACT
CTGTGGCTTACAGCAACAACAGCATTGCCATCCCAACCAACTTCACCATCTCTGTGACCACAGAGATT
CTGCCTGTGAGTATGACCAAGACCTCTGTGGACTGTACAATGTATATCTGTGGAGACAGCACAGAGTG
TAGCAACCTGCTGCTCCAATATGGCTCCTTCTGTACCCAACTTAACAGGGCTCTGACAGGCATTGCTG
TGGAACAGGACAAGAACACCCAGGAGGTGTTTGCCCAGGTGAAGCAGATTTACAAGACACCTCCAATC
AAGGACTTTGGAGGCTTCAACTTCAGCCAGATTCTGCCTGACCCAAGCAAGCCAAGCAAGAGGTCCTT
CATTGAGGACCTGCTGTTCAACAAGGTGACCCTGGCTGATGCTGGCTTCATCAAGCAATATGGAGACT
GTCTGGGAGACATTGCTGCCAGGGACCTGATTTGTGCCCAGAAGTTCAATGGACTGACAGTGCTGCCT
CCACTGCTGACAGATGAGATGATTGCCCAATACACCTCTGCCCTGCTGGCTGGCACCATCACCTCTGG
CTGGACCTTTGGAGCAGGAGCAGCCCTCCAAATCCCATTTGCTATGCAGATGGCTTACAGGTTCAATG
GCATTGGAGTGACCCAGAATGTGCTCTATGAGAACCAGAAACTGATTGCCAACCAGTTCAACTCTGCC
ATTGGCAAGATTCAGGACTCCCTGTCCAGCACAGCCTCTGCCCTGGGCAAACTCCAAGATGTGGTGAA
CCAGAATGCCCAGGCTCTGAACACCCTGGTGAAGCAACTTTCCAGCAACTTTGGAGCCATCTCCTCTG
TGCTGAATGACATCCTGAGCAGACTGGACcctcccGAGGCTGAGGTCCAGATTGACAGACTGATTACA
GGCAGACTCCAATCCCTCCAAACCTATGTGACCCAACAACTTATCAGGGCTGCTGAGATTAGGGCATC
TGCCAACCTGGCTGCCACCAAGATGAGTGAGTGTGTGCTGGGACAAAGCAAGAGGGTGGACTTCTGTG
GCAAGGGCTACCACCTGATGAGTTTTCCACAGTCTGCCCCTCATGGAGTGGTGTTCCTGCATGTGACC
TATGTGCCTGCCCAGGAGAAGAACTTCACCACAGCCCCTGCCATCTGCCATGATGGCAAGGCTCACTT
TCCAAGGGAGGGAGTGTTTGTGAGCAATGGCACCCACTGGTTTGTGACCCAGAGGAACTTCTATGAAC
CACAGATTATCACCACAGACAACACCTTTGTGTCTGGCAACTGTGATGTGGTGATTGGCATTGTGAAC
AACACAGTCTATGACCCACTCCAACCTGAACTGGACTCCTTCAAGGAGGAACTGGACAAATACTTCAA
GAACCACACCAGCCCTGATGTGGACCTGGGAGACATCTCTGGCATCAATGCCTCTGTGGTGAACATCC
AGAAGGAGATTGACAGACTGAATGAGGTGGCTAAGAACCTGAATGAGTCCCTGATTGACCTCCAAGAA
CTGGGCAAAtaagtttaaacccgctgatcagcctcgactgtgccttctagttgccagccatctgttgt
ttgcccctcccccgtgccttccttgaccctggaaggtgccactcccactgtcctttcctaataaaatg
aggaaattgcatcgcattgtctgagtaggtgtcattctattctggggggtggggtggggcaggacagc
aagggggaggattgggaagacaatagcaggcatgctggggatgcggtgggctctatggcttctgaggc
ggaaagaaccagctggggctctagggggtatccccacgcgccctgtagcggcgcattaagcgcggcgg
gtgtggtggttacgcgcagcgtgaccgctacacttgccagcgccctagcgcccgctcctttcgctttc
ttcccttcctttctcgccacgttcgccggctttccccgtcaagctctaaatcgggggctccctttagg
gttccgatttagtgctttacggcacctcgaccccaaaaaacttgattagggtgatggttcacgtagtg
ggccatcgccctgatagacggtttttcgccctttgacgttggagtccacgttctttaatagtggactc
ttgttccaaactggaacaacactcaaccctatctcggtctattcttttgatttataagggattttgcc
gatttcggcctattggttaaaaaatgagctgatttaacaaaaatttaacgcgaattaattctgtggaa
tgtgtgtcagttagggtgtggaaagtccccaggctccccagcaggcagaagtatgcaaagcatgcatc
tcaattagtcagcaaccaggtgtggaaagtccccaggctccccagcaggcagaagtatgcaaagcatg
catctcaattagtcagcaaccatagtcccgcccctaactccgcccatcccgcccctaactccgcccag
ttccgcccattctccgccccatggctgactaattttttttatttatgcagaggccgaggccgcctctg
cctctgagctattccagaagtagtgaggaggcttttttggaggcctaggcttttgcaaaaagctcccg
ggagcttgtatatccattttcggatctgatcaagagacaggatgaggatcgtttcgcatgattgaaca
agatggattgcacgcaggttctccggccgcttgggtggagaggctattcggctatgactgggcacaac
agacaatcggctgctctgatgccgccgtgttccggctgtcagcgcaggggcgcccggttctttttgtc
aagaccgacctgtccggtgccctgaatgaactgcaggacgaggcagcgcggctatcgtggctggccac
gacgggcgttccttgcgcagctgtgctcgacgttgtcactgaagcgggaagggactggctgctattgg
gcgaagtgccggggcaggatctcctgtcatctcaccttgctcctgccgagaaagtatccatcatggct
gatgcaatgcggcggctgcatacgcttgatccggctacctgcccattcgaccaccaagcgaaacatcg
catcgagcgagcacgtactcggatggaagccggtcttgtcgatcaggatgatctggacgaagagcatc
aggggctcgcgccagccgaactgttcgccaggctcaaggcgcgcatgcccgacggcgaggatctcgtc
gtgacccatggcgatgcctgcttgccgaatatcatggtggaaaatggccgcttttctggattcatcga
ctgtggccggctgggtgtggcggaccgctatcaggacatagcgttggctacccgtgatattgctgaag
agcttggcggcgaatgggctgaccgcttcctcgtgctttacggtatcgccgctcccgattcgcagcgc
atcgccttctatcgccttcttgacgagttcttctgagcgggactctggggttcgaaatgaccgaccaa
gcgacgcccaacctgccatcacgagatttcgattccaccgccgccttctatgaaaggttgggcttcgg
aatcgttttccgggacgccggctggatgatcctccagcgcggggatctcatgctggagttcttcgccc
accccaacttgtttattgcagcttataatggttacaaataaagcaatagcatcacaaatttcacaaat
aaagcatttttttcactgcattctagttgtggtttgtccaaactcatcaatgtatcttatcatgtctg
tataccgtcgacctctagctagagcttggcgtaatcatggtcatagctgtttcctgtgtgaaattgtt
atccgctcacaattccacacaacatacgagccggaagcataaagtgtaaagcctggggtgcctaatga
gtgagctaactcacattaattgcgttgcgctcactgcccgctttccagtcgggaaacctgtcgtgcca
gctgcattaatgaatcggccaacgcgcggggagaggcggtttgcgtattgggcgctcttccgcttcct
cgctcactgactcgctgcgctcggtcgttcggctgcggcgagcggtatcagctcactcaaaggcggta
atacggttatccacagaatcaggggataacgcaggaaagaacatgtgagcaaaaggccagcaaaaggc
caggaaccgtaaaaaggccgcgttgctggcgtttttccataggctccgcccccctgacgagcatcaca
aaaatcgacgctcaagtcagaggtggcgaaacccgacaggactataaagataccaggcgtttccccct
ggaagctccctcgtgcgctctcctgttccgaccctgccgcttaccggatacctgtccgcctttctccc
ttcgggaagcgtggcgctttctcatagctcacgctgtaggtatctcagttcggtgtaggtcgttcgct
ccaagctgggctgtgtgcacgaaccccccgttcagcccgaccgctgcgccttatccggtaactatcgt
cttgagtccaacccggtaagacacgacttatcgccactggcagcagccactggtaacaggattagcag
agcgaggtatgtaggcggtgctacagagttcttgaagtggtggcctaactacggctacactagaagaa
cagtatttggtatctgcgctctgctgaagccagttaccttcggaaaaagagttggtagctcttgatcc
ggcaaacaaaccaccgctggtagcggtttttttgtttgcaagcagcagattacgcgcagaaaaaaagg
atctcaagaagatcctttgatcttttctacggggtctgacgctcagtggaacgaaaactcacgttaag
ggattttggtcatgagattatcaaaaaggatcttcacctagatccttttaaattaaaaatgaagtttt
aaatcaatctaaagtatatatgagtaaacttggtctgacagttaccaatgcttaatcagtgaggcacc
tatctcagcgatctgtctatttcgttcatccatagttgcctgactccccgtcgtgtagataactacga
tacgggagggcttaccatctggccccagtgctgcaatgataccgcgagacccacgctcaccggctcca
gatttatcagcaataaaccagccagccggaagggccgagcgcagaagtggtcctgcaactttatccgc
ctccatccagtctattaattgttgccgggaagctagagtaagtagttcgccagttaatagtttgcgca
acgttgttgccattgctacaggcatcgtggtgtcacgctcgtcgtttggtatggcttcattcagctcc
ggttcccaacgatcaaggcgagttacatgatcccccatgttgtgcaaaaaagcggttagctccttcgg
tcctccgatcgttgtcagaagtaagttggccgcagtgttatcactcatggttatggcagcactgcata
attctcttactgtcatgccatccgtaagatgcttttctgtgactggtgagtactcaaccaagtcattc
tgagaatagtgtatgcggcgaccgagttgctcttgcccggcgtcaatacgggataataccgcgccaca
tagcagaactttaaaagtgctcatcattggaaaacgttcttcggggcgaaaactctcaaggatcttac
cgctgttgagatccagttcgatgtaacccactcgtgcacccaactgatcttcagcatcttttactttc
accagcgtttctgggtgagcaaaaacaggaaggcaaaatgccgcaaaaaagggaataagggcgacacg
gaaatgttgaatactcatactcttcctttttcaatattattgaagcatttatcagggttattgtctca
tgagcggatacatatttgaatgtatttagaaaaataaacaaataggggttccgcgcacatttccccga
aaagtgccacctgacgtc
pMD135_pcDNA3.1_SARS-CoV-2_stabilized-S-protein
SEQ ID NO: 112
gacggatcgggagatctcccgatcccctatggtgcactctcagtacaatctgctctgatgccgcatag
ttaagccagtatctgctccctgcttgtgtgttggaggtcgctgagtagtgcgcgagcaaaatttaagc
tacaacaaggcaaggcttgaccgacaattgcatgaagaatctgcttagggttaggcgttttgcgctgc
ttcgcgatgtacgggccagatatacgcgttgacattgattattgactagttattaatagtaatcaatt
acggggtcattagttcatagcccatatatggagttccgcgttacataacttacggtaaatggcccgcc
tggctgaccgcccaacgacccccgcccattgacgtcaataatgacgtatgttcccatagtaacgccaa
tagggactttccattgacgtcaatgggtggagtatttacggtaaactgcccacttggcagtacatcaa
gtgtatcatatgccaagtacgccccctattgacgtcaatgacggtaaatggcccgcctggcattatgc
ccagtacatgaccttatgggactttcctacttggcagtacatctacgtattagtcatcgctattacca
tggtgatgcggttttggcagtacatcaatgggcgtggatagcggtttgactcacggggatttccaagt
ctccaccccattgacgtcaatgggagtttgttttggcaccaaaatcaacgggactttccaaaatgtcg
taacaactccgccccattgacgcaaatgggcggtaggcgtgtacggtgggaggtctatataagcagag
ctctctggctaactagagaacccactgcttactggcttatcgaaattaatacgactcactatagggag
acccaagctggATGTTTGTGTTCCTGGTGCTGCTGCCACTGGTGTCCAGCCAGTGTGTGAACCTGACC
ACCAGGACCCAACTTCCTCCTGCCTACACCAACTCCTTCACCAGGGGAGTCTACTACCCTGACAAGGT
GTTCAGGTCCTCTGTGCTGCACAGCACCCAGGACCTGTTCCTGCCATTCTTCAGCAATGTGACCTGGT
TCCATGCCATCCATGTGTCTGGCACCAATGGCACCAAGAGGTTTGACAACCCTGTGCTGCCATTCAAT
GATGGAGTCTACTTTGCCAGCACAGAGAAGAGCAACATCATCAGGGGCTGGATTTTTGGCACCACCCT
GGACAGCAAGACCCAGTCCCTGCTGATTGTGAACAATGCCACCAATGTGGTGATTAAGGTGTGTGAGT
TCCAGTTCTGTAATGACCCATTCCTGGGAGTCTACTACCACAAGAACAACAAGTCCTGGATGGAGTCT
GAGTTCAGGGTCTACTCCTCTGCCAACAACTGTACCTTTGAATATGTGAGCCAACCATTCCTGATGGA
CTTGGAGGGCAAGCAGGGCAACTTCAAGAACCTGAGGGAGTTTGTGTTCAAGAACATTGATGGCTACT
TCAAGATTTACAGCAAACACACACCAATCAACCTGGTGAGGGACCTGCCACAGGGCTTCTCTGCCTTG
GAACCACTGGTGGACCTGCCAATTGGCATCAACATCACCAGGTTCCAGACCCTGCTGGCTCTGCACAG
GTCCTACCTGACACCTGGAGACTCCTCCTCTGGCTGGACAGCAGGAGCAGCAGCCTACTATGTGGGCT
ACCTCCAACCAAGGACCTTCCTGCTGAAATACAATGAGAATGGCACCATCACAGATGCTGTGGACTGT
GCCCTGGACCCACTGTCTGAGACCAAGTGTACCCTGAAATCCTTCACAGTGGAGAAGGGCATCTACCA
GACCAGCAACTTCAGGGTCCAACCAACAGAGAGCATTGTGAGGTTTCCAAACATCACCAACCTGTGTC
CATTTGGAGAGGTGTTCAATGCCACCAGGTTTGCCTCTGTCTATGCCTGGAACAGGAAGAGGATTAGC
AACTGTGTGGCTGACTACTCTGTGCTCTACAACTCTGCCTCCTTCAGCACCTTCAAGTGTTATGGAGT
GAGCCCAACCAAACTGAATGACCTGTGTTTCACCAATGTCTATGCTGACTCCTTTGTGATTAGGGGAG
ATGAGGTGAGACAGATTGCCCCTGGACAAACAGGCAAGATTGCTGACTACAACTACAAACTGCCTGAT
GACTTCACAGGCTGTGTGATTGCCTGGAACAGCAACAACCTGGACAGCAAGGTGGGAGGCAACTACAA
CTACCTCTACAGACTGTTCAGGAAGAGCAACCTGAAACCATTTGAGAGGGACATCAGCACAGAGATTT
ACCAGGCTGGCAGCACACCATGTAATGGAGTGGAGGGCTTCAACTGTTACTTTCCACTCCAATCCTAT
GGCTTCCAACCAACCAATGGAGTGGGCTACCAACCATACAGGGTGGTGGTGCTGTCCTTTGAACTGCT
CCATGCCCCTGCCACAGTGTGTGGACCAAAGAAGAGCACCAACCTGGTGAAGAACAAGTGTGTGAACT
TCAACTTCAATGGACTGACAGGCACAGGAGTGCTGACAGAGAGCAACAAGAAGTTCCTGCCATTCCAA
CAGTTTGGCAGGGACATTGCTGACACCACAGATGCTGTGAGGGACCCACAGACCTTGGAGATTCTGGA
CATCACACCATGTTCCTTTGGAGGAGTGTCTGTGATTACACCTGGCACCAACACCAGCAACCAGGTGG
CTGTGCTCTACCAGGATGTGAACTGTACTGAGGTGCCTGTGGCTATCCATGCTGACCAACTTACACCA
ACCTGGAGGGTCTACAGCACAGGCAGCAATGTGTTCCAGACCAGGGCTGGCTGTCTGATTGGAGCAGA
GCATGTGAACAACTCCTATGAGTGTGACATCCCAATTGGAGCAGGCATCTGTGCCTCCTACCAGACCC
AGACCAACAGCCCAAGGAGGGCAAGGTCTGTGGCAAGCCAGAGCATCATTGCCTACACAATGAGTCTG
GGAGCAGAGAACTCTGTGGCTTACAGCAACAACAGCATTGCCATCCCAACCAACTTCACCATCTCTGT
GACCACAGAGATTCTGCCTGTGAGTATGACCAAGACCTCTGTGGACTGTACAATGTATATCTGTGGAG
ACAGCACAGAGTGTAGCAACCTGCTGCTCCAATATGGCTCCTTCTGTACCCAACTTAACAGGGCTCTG
ACAGGCATTGCTGTGGAACAGGACAAGAACACCCAGGAGGTGTTTGCCCAGGTGAAGCAGATTTACAA
GACACCTCCAATCAAGGACTTTGGAGGCTTCAACTTCAGCCAGATTCTGCCTGACCCAAGCAAGCCAA
GCAAGAGGTCCTTCATTGAGGACCTGCTGTTCAACAAGGTGACCCTGGCTGATGCTGGCTTCATCAAG
CAATATGGAGACTGTCTGGGAGACATTGCTGCCAGGGACCTGATTTGTGCCCAGAAGTTCAATGGACT
GACAGTGCTGCCTCCACTGCTGACAGATGAGATGATTGCCCAATACACCTCTGCCCTGCTGGCTGGCA
CCATCACCTCTGGCTGGACCTTTGGAGCAGGAGCAGCCCTCCAAATCCCATTTGCTATGCAGATGGCT
TACAGGTTCAATGGCATTGGAGTGACCCAGAATGTGCTCTATGAGAACCAGAAACTGATTGCCAACCA
GTTCAACTCTGCCATTGGCAAGATTCAGGACTCCCTGTCCAGCACAGCCTCTGCCCTGGGCAAACTCC
AAGATGTGGTGAACCAGAATGCCCAGGCTCTGAACACCCTGGTGAAGCAACTTTCCAGCAACTTTGGA
GCCATCTCCTCTGTGCTGAATGACATCCTGAGCAGACTGGACcctcccGAGGCTGAGGTCCAGATTGA
CAGACTGATTACAGGCAGACTCCAATCCCTCCAAACCTATGTGACCCAACAACTTATCAGGGCTGCTG
AGATTAGGGCATCTGCCAACCTGGCTGCCACCAAGATGAGTGAGTGTGTGCTGGGACAAAGCAAGAGG
GTGGACTTCTGTGGCAAGGGCTACCACCTGATGAGTTTTCCACAGTCTGCCCCTCATGGAGTGGTGTT
CCTGCATGTGACCTATGTGCCTGCCCAGGAGAAGAACTTCACCACAGCCCCTGCCATCTGCCATGATG
GCAAGGCTCACTTTCCAAGGGAGGGAGTGTTTGTGAGCAATGGCACCCACTGGTTTGTGACCCAGAGG
AACTTCTATGAACCACAGATTATCACCACAGACAACACCTTTGTGTCTGGCAACTGTGATGTGGTGAT
TGGCATTGTGAACAACACAGTCTATGACCCACTCCAACCTGAACTGGACTCCTTCAAGGAGGAACTGG
ACAAATACTTCAAGAACCACACCAGCCCTGATGTGGACCTGGGAGACATCTCTGGCATCAATGCCTCT
GTGGTGAACATCCAGAAGGAGATTGACAGACTGAATGAGGTGGCTAAGAACCTGAATGAGTCCCTGAT
TGACCTCCAAGAACTGGGCAAAtaagtttaaacccgctgatcagcctcgactgtgccttctagttgcc
agccatctgttgtttgcccctcccccgtgccttccttgaccctggaaggtgccactcccactgtcctt
tcctaataaaatgaggaaattgcatcgcattgtctgagtaggtgtcattctattctggggggtggggt
ggggcaggacagcaagggggaggattgggaagacaatagcaggcatgctggggatgcggtgggctcta
tggcttctgaggcggaaagaaccagctggggctctagggggtatccccacgcgccctgtagcggcgca
ttaagcgcggcgggtgtggtggttacgcgcagcgtgaccgctacacttgccagcgccctagcgcccgc
tcctttcgctttcttcccttcctttctcgccacgttcgccggctttccccgtcaagctctaaatcggg
ggctccctttagggttccgatttagtgctttacggcacctcgaccccaaaaaacttgattagggtgat
ggttcacgtagtgggccatcgccctgatagacggtttttcgccctttgacgttggagtccacgttctt
taatagtggactcttgttccaaactggaacaacactcaaccctatctcggtctattcttttgatttat
aagggattttgccgatttcggcctattggttaaaaaatgagctgatttaacaaaaatttaacgcgaat
taattctgtggaatgtgtgtcagttagggtgtggaaagtccccaggctccccagcaggcagaagtatg
caaagcatgcatctcaattagtcagcaaccaggtgtggaaagtccccaggctccccagcaggcagaag
tatgcaaagcatgcatctcaattagtcagcaaccatagtcccgcccctaactccgcccatcccgcccc
taactccgcccagttccgcccattctccgccccatggctgactaattttttttatttatgcagaggcc
gaggccgcctctgcctctgagctattccagaagtagtgaggaggcttttttggaggcctaggcttttg
caaaaagctcccgggagcttgtatatccattttcggatctgatcaagagacaggatgaggatcgtttc
gcatgattgaacaagatggattgcacgcaggttctccggccgcttgggtggagaggctattcggctat
gactgggcacaacagacaatcggctgctctgatgccgccgtgttccggctgtcagcgcaggggcgccc
ggttctttttgtcaagaccgacctgtccggtgccctgaatgaactgcaggacgaggcagcgcggctat
cgtggctggccacgacgggcgttccttgcgcagctgtgctcgacgttgtcactgaagcgggaagggac
tggctgctattgggcgaagtgccggggcaggatctcctgtcatctcaccttgctcctgccgagaaagt
atccatcatggctgatgcaatgcggcggctgcatacgcttgatccggctacctgcccattcgaccacc
aagcgaaacatcgcatcgagcgagcacgtactcggatggaagccggtcttgtcgatcaggatgatctg
gacgaagagcatcaggggctcgcgccagccgaactgttcgccaggctcaaggcgcgcatgcccgacgg
cgaggatctcgtcgtgacccatggcgatgcctgcttgccgaatatcatggtggaaaatggccgctttt
ctggattcatcgactgtggccggctgggtgtggcggaccgctatcaggacatagcgttggctacccgt
gatattgctgaagagcttggcggcgaatgggctgaccgcttcctcgtgctttacggtatcgccgctcc
cgattcgcagcgcatcgccttctatcgccttcttgacgagttcttctgagcgggactctggggttcga
aatgaccgaccaagcgacgcccaacctgccatcacgagatttcgattccaccgccgccttctatgaaa
ggttgggcttcggaatcgttttccgggacgccggctggatgatcctccagcgcggggatctcatgctg
gagttcttcgcccaccccaacttgtttattgcagcttataatggttacaaataaagcaatagcatcac
aaatttcacaaataaagcatttttttcactgcattctagttgtggtttgtccaaactcatcaatgtat
cttatcatgtctgtataccgtcgacctctagctagagcttggcgtaatcatggtcatagctgtttcct
gtgtgaaattgttatccgctcacaattccacacaacatacgagccggaagcataaagtgtaaagcctg
gggtgcctaatgagtgagctaactcacattaattgcgttgcgctcactgcccgctttccagtcgggaa
acctgtcgtgccagctgcattaatgaatcggccaacgcgcggggagaggcggtttgcgtattgggcgc
tcttccgcttcctcgctcactgactcgctgcgctcggtcgttcggctgcggcgagcggtatcagctca
ctcaaaggcggtaatacggttatccacagaatcaggggataacgcaggaaagaacatgtgagcaaaag
gccagcaaaaggccaggaaccgtaaaaaggccgcgttgctggcgtttttccataggctccgcccccct
gacgagcatcacaaaaatcgacgctcaagtcagaggtggcgaaacccgacaggactataaagatacca
ggcgtttccccctggaagctccctcgtgcgctctcctgttccgaccctgccgcttaccggatacctgt
ccgcctttctcccttcgggaagcgtggcgctttctcatagctcacgctgtaggtatctcagttcggtg
taggtcgttcgctccaagctgggctgtgtgcacgaaccccccgttcagcccgaccgctgcgccttatc
cggtaactatcgtcttgagtccaacccggtaagacacgacttatcgccactggcagcagccactggta
acaggattagcagagcgaggtatgtaggcggtgctacagagttcttgaagtggtggcctaactacggc
tacactagaagaacagtatttggtatctgcgctctgctgaagccagttaccttcggaaaaagagttgg
tagctcttgatccggcaaacaaaccaccgctggtagcggtttttttgtttgcaagcagcagattacgc
gcagaaaaaaaggatctcaagaagatcctttgatcttttctacggggtctgacgctcagtggaacgaa
aactcacgttaagggattttggtcatgagattatcaaaaaggatcttcacctagatccttttaaatta
aaaatgaagttttaaatcaatctaaagtatatatgagtaaacttggtctgacagttaccaatgcttaa
tcagtgaggcacctatctcagcgatctgtctatttcgttcatccatagttgcctgactccccgtcgtg
tagataactacgatacgggagggcttaccatctggccccagtgctgcaatgataccgcgagacccacg
ctcaccggctccagatttatcagcaataaaccagccagccggaagggccgagcgcagaagtggtcctg
caactttatccgcctccatccagtctattaattgttgccgggaagctagagtaagtagttcgccagtt
aatagtttgcgcaacgttgttgccattgctacaggcatcgtggtgtcacgctcgtcgtttggtatggc
ttcattcagctccggttcccaacgatcaaggcgagttacatgatcccccatgttgtgcaaaaaagcgg
ttagctccttcggtcctccgatcgttgtcagaagtaagttggccgcagtgttatcactcatggttatg
gcagcactgcataattctcttactgtcatgccatccgtaagatgcttttctgtgactggtgagtactc
aaccaagtcattctgagaatagtgtatgcggcgaccgagttgctcttgcccggcgtcaatacgggata
ataccgcgccacatagcagaactttaaaagtgctcatcattggaaaacgttcttcggggcgaaaactc
tcaaggatcttaccgctgttgagatccagttcgatgtaacccactcgtgcacccaactgatcttcagc
atcttttactttcaccagcgtttctgggtgagcaaaaacaggaaggcaaaatgccgcaaaaaagggaa
taagggcgacacggaaatgttgaatactcatactcttcctttttcaatattattgaagcatttatcag
ggttattgtctcatgagcggatacatatttgaatgtatttagaaaaataaacaaataggggttccgcg
cacatttccccgaaaagtgccacctgacgtc
pMD136-pcDNA3.1-SARS2-GGSG-foldon-G-6xHis-streptavidin-T2A-
mScarlet
SEQ ID NO: 113
gacggatcgggagatctcccgatcccctatggtgcactctcagtacaatctgctctgatgccgcatag
ttaagccagtatctgctccctgcttgtgtgttggaggtcgctgagtagtgcgcgagcaaaatttaagc
tacaacaaggcaaggcttgaccgacaattgcatgaagaatctgcttagggttaggcgttttgcgctgc
ttcgcgatgtacgggccagatatacgcgttgacattgattattgactagttattaatagtaatcaatt
acggggtcattagttcatagcccatatatggagttccgcgttacataacttacggtaaatggcccgcc
tggctgaccgcccaacgacccccgcccattgacgtcaataatgacgtatgttcccatagtaacgccaa
tagggactttccattgacgtcaatgggtggagtatttacggtaaactgcccacttggcagtacatcaa
gtgtatcatatgccaagtacgccccctattgacgtcaatgacggtaaatggcccgcctggcattatgc
ccagtacatgaccttatgggactttcctacttggcagtacatctacgtattagtcatcgctattacca
tggtgatgcggttttggcagtacatcaatgggcgtggatagcggtttgactcacggggatttccaagt
ctccaccccattgacgtcaatgggagtttgttttggcaccaaaatcaacgggactttccaaaatgtcg
taacaactccgccccattgacgcaaatgggcggtaggcgtgtacggtgggaggtctatataagcagag
ctctctggctaactagagaacccactgcttactggcttatcgaaattaatacgactcactatagggag
acccaagctggATGTTTGTGTTCCTGGTGCTGCTGCCACTGGTGTCCAGCCAGTGTGTGAACCTGACC
ACCAGGACCCAACTTCCTCCTGCCTACACCAACTCCTTCACCAGGGGAGTCTACTACCCTGACAAGGT
GTTCAGGTCCTCTGTGCTGCACAGCACCCAGGACCTGTTCCTGCCATTCTTCAGCAATGTGACCTGGT
TCCATGCCATCCATGTGTCTGGCACCAATGGCACCAAGAGGTTTGACAACCCTGTGCTGCCATTCAAT
GATGGAGTCTACTTTGCCAGCACAGAGAAGAGCAACATCATCAGGGGCTGGATTTTTGGCACCACCCT
GGACAGCAAGACCCAGTCCCTGCTGATTGTGAACAATGCCACCAATGTGGTGATTAAGGTGTGTGAGT
TCCAGTTCTGTAATGACCCATTCCTGGGAGTCTACTACCACAAGAACAACAAGTCCTGGATGGAGTCT
GAGTTCAGGGTCTACTCCTCTGCCAACAACTGTACCTTTGAATATGTGAGCCAACCATTCCTGATGGA
CTTGGAGGGCAAGCAGGGCAACTTCAAGAACCTGAGGGAGTTTGTGTTCAAGAACATTGATGGCTACT
TCAAGATTTACAGCAAACACACACCAATCAACCTGGTGAGGGACCTGCCACAGGGCTTCTCTGCCTTG
GAACCACTGGTGGACCTGCCAATTGGCATCAACATCACCAGGTTCCAGACCCTGCTGGCTCTGCACAG
GTCCTACCTGACACCTGGAGACTCCTCCTCTGGCTGGACAGCAGGAGCAGCAGCCTACTATGTGGGCT
ACCTCCAACCAAGGACCTTCCTGCTGAAATACAATGAGAATGGCACCATCACAGATGCTGTGGACTGT
GCCCTGGACCCACTGTCTGAGACCAAGTGTACCCTGAAATCCTTCACAGTGGAGAAGGGCATCTACCA
GACCAGCAACTTCAGGGTCCAACCAACAGAGAGCATTGTGAGGTTTCCAAACATCACCAACCTGTGTC
CATTTGGAGAGGTGTTCAATGCCACCAGGTTTGCCTCTGTCTATGCCTGGAACAGGAAGAGGATTAGC
AACTGTGTGGCTGACTACTCTGTGCTCTACAACTCTGCCTCCTTCAGCACCTTCAAGTGTTATGGAGT
GAGCCCAACCAAACTGAATGACCTGTGTTTCACCAATGTCTATGCTGACTCCTTTGTGATTAGGGGAG
ATGAGGTGAGACAGATTGCCCCTGGACAAACAGGCAAGATTGCTGACTACAACTACAAACTGCCTGAT
GACTTCACAGGCTGTGTGATTGCCTGGAACAGCAACAACCTGGACAGCAAGGTGGGAGGCAACTACAA
CTACCTCTACAGACTGTTCAGGAAGAGCAACCTGAAACCATTTGAGAGGGACATCAGCACAGAGATTT
ACCAGGCTGGCAGCACACCATGTAATGGAGTGGAGGGCTTCAACTGTTACTTTCCACTCCAATCCTAT
GGCTTCCAACCAACCAATGGAGTGGGCTACCAACCATACAGGGTGGTGGTGCTGTCCTTTGAACTGCT
CCATGCCCCTGCCACAGTGTGTGGACCAAAGAAGAGCACCAACCTGGTGAAGAACAAGTGTGTGAACT
TCAACTTCAATGGACTGACAGGCACAGGAGTGCTGACAGAGAGCAACAAGAAGTTCCTGCCATTCCAA
CAGTTTGGCAGGGACATTGCTGACACCACAGATGCTGTGAGGGACCCACAGACCTTGGAGATTCTGGA
CATCACACCATGTTCCTTTGGAGGAGTGTCTGTGATTACACCTGGCACCAACACCAGCAACCAGGTGG
CTGTGCTCTACCAGGATGTGAACTGTACTGAGGTGCCTGTGGCTATCCATGCTGACCAACTTACACCA
ACCTGGAGGGTCTACAGCACAGGCAGCAATGTGTTCCAGACCAGGGCTGGCTGTCTGATTGGAGCAGA
GCATGTGAACAACTCCTATGAGTGTGACATCCCAATTGGAGCAGGCATCTGTGCCTCCTACCAGACCC
AGACCAACAGCCCAAGGAGGGCAAGGTCTGTGGCAAGCCAGAGCATCATTGCCTACACAATGAGTCTG
GGAGCAGAGAACTCTGTGGCTTACAGCAACAACAGCATTGCCATCCCAACCAACTTCACCATCTCTGT
GACCACAGAGATTCTGCCTGTGAGTATGACCAAGACCTCTGTGGACTGTACAATGTATATCTGTGGAG
ACAGCACAGAGTGTAGCAACCTGCTGCTCCAATATGGCTCCTTCTGTACCCAACTTAACAGGGCTCTG
ACAGGCATTGCTGTGGAACAGGACAAGAACACCCAGGAGGTGTTTGCCCAGGTGAAGCAGATTTACAA
GACACCTCCAATCAAGGACTTTGGAGGCTTCAACTTCAGCCAGATTCTGCCTGACCCAAGCAAGCCAA
GCAAGAGGTCCTTCATTGAGGACCTGCTGTTCAACAAGGTGACCCTGGCTGATGCTGGCTTCATCAAG
CAATATGGAGACTGTCTGGGAGACATTGCTGCCAGGGACCTGATTTGTGCCCAGAAGTTCAATGGACT
GACAGTGCTGCCTCCACTGCTGACAGATGAGATGATTGCCCAATACACCTCTGCCCTGCTGGCTGGCA
CCATCACCTCTGGCTGGACCTTTGGAGCAGGAGCAGCCCTCCAAATCCCATTTGCTATGCAGATGGCT
TACAGGTTCAATGGCATTGGAGTGACCCAGAATGTGCTCTATGAGAACCAGAAACTGATTGCCAACCA
GTTCAACTCTGCCATTGGCAAGATTCAGGACTCCCTGTCCAGCACAGCCTCTGCCCTGGGCAAACTCC
AAGATGTGGTGAACCAGAATGCCCAGGCTCTGAACACCCTGGTGAAGCAACTTTCCAGCAACTTTGGA
GCCATCTCCTCTGTGCTGAATGACATCCTGAGCAGACTGGACcctcccGAGGCTGAGGTCCAGATTGA
CAGACTGATTACAGGCAGACTCCAATCCCTCCAAACCTATGTGACCCAACAACTTATCAGGGCTGCTG
AGATTAGGGCATCTGCCAACCTGGCTGCCACCAAGATGAGTGAGTGTGTGCTGGGACAAAGCAAGAGG
GTGGACTTCTGTGGCAAGGGCTACCACCTGATGAGTTTTCCACAGTCTGCCCCTCATGGAGTGGTGTT
CCTGCATGTGACCTATGTGCCTGCCCAGGAGAAGAACTTCACCACAGCCCCTGCCATCTGCCATGATG
GCAAGGCTCACTTTCCAAGGGAGGGAGTGTTTGTGAGCAATGGCACCCACTGGTTTGTGACCCAGAGG
AACTTCTATGAACCACAGATTATCACCACAGACAACACCTTTGTGTCTGGCAACTGTGATGTGGTGAT
TGGCATTGTGAACAACACAGTCTATGACCCACTCCAACCTGAACTGGACTCCTTCAAGGAGGAACTGG
ACAAATACTTCAAGAACCACACCAGCCCTGATGTGGACCTGGGAGACATCTCTGGCATCAATGCCTCT
GTGGTGAACATCCAGAAGGAGATTGACAGACTGAATGAGGTGGCTAAGAACCTGAATGAGTCCCTGAT
TGACCTCCAAGAACTGGGCAAAggcggaggcagcgggTATATTCCGGAGGCTCCAAGAGACGGTCAGG
CGTACGTACGGAAGGACGGCGAATGGGTTCTCTTGAGCACTTTCTTAggcCATCATCATCACCACCAT
ATGGCGGAAGCTGGCATTACGGGGACCTGGTACAACCAACTTGGTTCAACATTCATTGTGACTGCGGG
AGCCGACGGAGCCCTCACGGGCACCTATGAGTCCGCCGTTGGCAATGCGGAGTCTCGCTATGTCCTGA
CAGGTAGATATGACAGCGCACCGGCTACGGACGGAAGTGGTACTGCTCTCGGTTGGACCGTGGCCTGG
AAAAACAATTATAGGAACGCACATAGCGCGACGACCTGGAGTGGACAATATGTCGGCGGCGCTGAAGC
CAGGATAAACACCCAATGGCTTCTCACCTCCGGAACAACTGAAGCAAACGCGTGGAAAAGCACTCTTG
TAGGCCACGACACGTTCACGAAGGTAAAGCCGAGCGCCGCATCCTATGAACAAggcagtggagagggc
agaggaagtctgctaacatgcggtgacgtcgaggagaatcctggcccaatgagtaaaggagaagctgt
gattaaagagttcatgcgcttcaaagttcacatggagggttctatgaacggtcacgagttcgagatcg
aaggcgaaggcgagggccgtccgtatgaaggcacccagaccgccaaactgaaagtgactaaaggcggc
ccgctgcctttttcctgggacatcctgagcccgcaatttatgtacggttctagggcgttcaccaaaca
cccagcggatatcccggactattataagcagtcttttccggaaggtttcaagtgggaacgcgtaatga
attttgaagatggtggtgccgtgaccgtcactcaggacacctccctggaggatggcaccctgatctat
aaagttaaactgcgtggtactaattttccacctgatggcccggtgatgcagaaaaagacgatgggttg
ggaggcgtctaccgaacgcttgtatccggaagatggtgtgctgaaaggcgacattaaaatggccctgc
gcctgaaagatggcggccgctatctggctgacttcaaaaccacgtacaaagccaagaaacctgtgcag
atgcctggcgcgtacaatgtggaccgcaaactggacatcacctctcataatgaagattatacggtggt
agagcaatatgagcgctccgagggtcgtcattctaccggtggcatggatgaactatacaaataagttt
aaacccgctgatcagcctcgactgtgccttctagttgccagccatctgttgtttgcccctcccccgtg
ccttccttgaccctggaaggtgccactcccactgtcctttcctaataaaatgaggaaattgcatcgca
ttgtctgagtaggtgtcattctattctggggggtggggtggggcaggacagcaagggggaggattggg
aagacaatagcaggcatgctggggatgcggtgggctctatggcttctgaggcggaaagaaccagctgg
ggctctagggggtatccccacgcgccctgtagcggcgcattaagcgcggcgggtgtggtggttacgcg
cagcgtgaccgctacacttgccagcgccctagcgcccgctcctttcgctttcttcccttcctttctcg
ccacgttcgccggctttccccgtcaagctctaaatcgggggctccctttagggttccgatttagtgct
ttacggcacctcgaccccaaaaaacttgattagggtgatggttcacgtagtgggccatcgccctgata
gacggtttttcgccctttgacgttggagtccacgttctttaatagtggactcttgttccaaactggaa
caacactcaaccctatctcggtctattcttttgatttataagggattttgccgatttcggcctattgg
ttaaaaaatgagctgatttaacaaaaatttaacgcgaattaattctgtggaatgtgtgtcagttaggg
tgtggaaagtccccaggctccccagcaggcagaagtatgcaaagcatgcatctcaattagtcagcaac
caggtgtggaaagtccccaggctccccagcaggcagaagtatgcaaagcatgcatctcaattagtcag
caaccatagtcccgcccctaactccgcccatcccgcccctaactccgcccagttccgcccattctccg
ccccatggctgactaattttttttatttatgcagaggccgaggccgcctctgcctctgagctattcca
gaagtagtgaggaggcttttttggaggcctaggcttttgcaaaaagctcccgggagcttgtatatcca
ttttcggatctgatcaagagacaggatgaggatcgtttcgcatgattgaacaagatggattgcacgca
ggttctccggccgcttgggtggagaggctattcggctatgactgggcacaacagacaatcggctgctc
tgatgccgccgtgttccggctgtcagcgcaggggcgcccggttctttttgtcaagaccgacctgtccg
gtgccctgaatgaactgcaggacgaggcagcgcggctatcgtggctggccacgacgggcgttccttgc
gcagctgtgctcgacgttgtcactgaagcgggaagggactggctgctattgggcgaagtgccggggca
ggatctcctgtcatctcaccttgctcctgccgagaaagtatccatcatggctgatgcaatgcggcggc
tgcatacgcttgatccggctacctgcccattcgaccaccaagcgaaacatcgcatcgagcgagcacgt
actcggatggaagccggtcttgtcgatcaggatgatctggacgaagagcatcaggggctcgcgccagc
cgaactgttcgccaggctcaaggcgcgcatgcccgacggcgaggatctcgtcgtgacccatggcgatg
cctgcttgccgaatatcatggtggaaaatggccgcttttctggattcatcgactgtggccggctgggt
gtggcggaccgctatcaggacatagcgttggctacccgtgatattgctgaagagcttggcggcgaatg
ggctgaccgcttcctcgtgctttacggtatcgccgctcccgattcgcagcgcatcgccttctatcgcc
ttcttgacgagttcttctgagcgggactctggggttcgaaatgaccgaccaagcgacgcccaacctgc
catcacgagatttcgattccaccgccgccttctatgaaaggttgggcttcggaatcgttttccgggac
gccggctggatgatcctccagcgcggggatctcatgctggagttcttcgcccaccccaacttgtttat
tgcagcttataatggttacaaataaagcaatagcatcacaaatttcacaaataaagcatttttttcac
tgcattctagttgtggtttgtccaaactcatcaatgtatcttatcatgtctgtataccgtcgacctct
agctagagcttggcgtaatcatggtcatagctgtttcctgtgtgaaattgttatccgctcacaattcc
acacaacatacgagccggaagcataaagtgtaaagcctggggtgcctaatgagtgagctaactcacat
taattgcgttgcgctcactgcccgctttccagtcgggaaacctgtcgtgccagctgcattaatgaatc
ggccaacgcgcggggagaggcggtttgcgtattgggcgctcttccgcttcctcgctcactgactcgct
gcgctcggtcgttcggctgcggcgagcggtatcagctcactcaaaggcggtaatacggttatccacag
aatcaggggataacgcaggaaagaacatgtgagcaaaaggccagcaaaaggccaggaaccgtaaaaag
gccgcgttgctggcgtttttccataggctccgcccccctgacgagcatcacaaaaatcgacgctcaag
tcagaggtggcgaaacccgacaggactataaagataccaggcgtttccccctggaagctccctcgtgc
gctctcctgttccgaccctgccgcttaccggatacctgtccgcctttctcccttcgggaagcgtggcg
ctttctcatagctcacgctgtaggtatctcagttcggtgtaggtcgttcgctccaagctgggctgtgt
gcacgaaccccccgttcagcccgaccgctgcgccttatccggtaactatcgtcttgagtccaacccgg
taagacacgacttatcgccactggcagcagccactggtaacaggattagcagagcgaggtatgtaggc
ggtgctacagagttcttgaagtggtggcctaactacggctacactagaagaacagtatttggtatctg
cgctctgctgaagccagttaccttcggaaaaagagttggtagctcttgatccggcaaacaaaccaccg
ctggtagcggtttttttgtttgcaagcagcagattacgcgcagaaaaaaaggatctcaagaagatcct
ttgatcttttctacggggtctgacgctcagtggaacgaaaactcacgttaagggattttggtcatgag
attatcaaaaaggatcttcacctagatccttttaaattaaaaatgaagttttaaatcaatctaaagta
tatatgagtaaacttggtctgacagttaccaatgcttaatcagtgaggcacctatctcagcgatctgt
ctatttcgttcatccatagttgcctgactccccgtcgtgtagataactacgatacgggagggcttacc
atctggccccagtgctgcaatgataccgcgagacccacgctcaccggctccagatttatcagcaataa
accagccagccggaagggccgagcgcagaagtggtcctgcaactttatccgcctccatccagtctatt
aattgttgccgggaagctagagtaagtagttcgccagttaatagtttgcgcaacgttgttgccattgc
tacaggcatcgtggtgtcacgctcgtcgtttggtatggcttcattcagctccggttcccaacgatcaa
ggcgagttacatgatcccccatgttgtgcaaaaaagcggttagctccttcggtcctccgatcgttgtc
agaagtaagttggccgcagtgttatcactcatggttatggcagcactgcataattctcttactgtcat
gccatccgtaagatgcttttctgtgactggtgagtactcaaccaagtcattctgagaatagtgtatgc
ggcgaccgagttgctcttgcccggcgtcaatacgggataataccgcgccacatagcagaactttaaaa
gtgctcatcattggaaaacgttcttcggggcgaaaactctcaaggatcttaccgctgttgagatccag
ttcgatgtaacccactcgtgcacccaactgatcttcagcatcttttactttcaccagcgtttctgggt
gagcaaaaacaggaaggcaaaatgccgcaaaaaagggaataagggcgacacggaaatgttgaatactc
atactcttcctttttcaatattattgaagcatttatcagggttattgtctcatgagcggatacatatt
tgaatgtatttagaaaaataaacaaataggggttccgcgcacatttccccgaaaagtgccacctgacg
tc
pMD137-pcDNA3.1-SARS2-GGSG-foldon-G-6xHis-BirA-T2A-mScarlet
SEQ ID NO: 114
gacggatcgggagatctcccgatcccctatggtgcactctcagtacaatctgctctgatgccgcatag
ttaagccagtatctgctccctgcttgtgtgttggaggtcgctgagtagtgcgcgagcaaaatttaagc
tacaacaaggcaaggcttgaccgacaattgcatgaagaatctgcttagggttaggcgttttgcgctgc
ttcgcgatgtacgggccagatatacgcgttgacattgattattgactagttattaatagtaatcaatt
acggggtcattagttcatagcccatatatggagttccgcgttacataacttacggtaaatggcccgcc
tggctgaccgcccaacgacccccgcccattgacgtcaataatgacgtatgttcccatagtaacgccaa
tagggactttccattgacgtcaatgggtggagtatttacggtaaactgcccacttggcagtacatcaa
gtgtatcatatgccaagtacgccccctattgacgtcaatgacggtaaatggcccgcctggcattatgc
ccagtacatgaccttatgggactttcctacttggcagtacatctacgtattagtcatcgctattacca
tggtgatgcggttttggcagtacatcaatgggcgtggatagcggtttgactcacggggatttccaagt
ctccaccccattgacgtcaatgggagtttgttttggcaccaaaatcaacgggactttccaaaatgtcg
taacaactccgccccattgacgcaaatgggcggtaggcgtgtacggtgggaggtctatataagcagag
ctctctggctaactagagaacccactgcttactggcttatcgaaattaatacgactcactatagggag
acccaagctggATGTTTGTGTTCCTGGTGCTGCTGCCACTGGTGTCCAGCCAGTGTGTGAACCTGACC
ACCAGGACCCAACTTCCTCCTGCCTACACCAACTCCTTCACCAGGGGAGTCTACTACCCTGACAAGGT
GTTCAGGTCCTCTGTGCTGCACAGCACCCAGGACCTGTTCCTGCCATTCTTCAGCAATGTGACCTGGT
TCCATGCCATCCATGTGTCTGGCACCAATGGCACCAAGAGGTTTGACAACCCTGTGCTGCCATTCAAT
GATGGAGTCTACTTTGCCAGCACAGAGAAGAGCAACATCATCAGGGGCTGGATTTTTGGCACCACCCT
GGACAGCAAGACCCAGTCCCTGCTGATTGTGAACAATGCCACCAATGTGGTGATTAAGGTGTGTGAGT
TCCAGTTCTGTAATGACCCATTCCTGGGAGTCTACTACCACAAGAACAACAAGTCCTGGATGGAGTCT
GAGTTCAGGGTCTACTCCTCTGCCAACAACTGTACCTTTGAATATGTGAGCCAACCATTCCTGATGGA
CTTGGAGGGCAAGCAGGGCAACTTCAAGAACCTGAGGGAGTTTGTGTTCAAGAACATTGATGGCTACT
TCAAGATTTACAGCAAACACACACCAATCAACCTGGTGAGGGACCTGCCACAGGGCTTCTCTGCCTTG
GAACCACTGGTGGACCTGCCAATTGGCATCAACATCACCAGGTTCCAGACCCTGCTGGCTCTGCACAG
GTCCTACCTGACACCTGGAGACTCCTCCTCTGGCTGGACAGCAGGAGCAGCAGCCTACTATGTGGGCT
ACCTCCAACCAAGGACCTTCCTGCTGAAATACAATGAGAATGGCACCATCACAGATGCTGTGGACTGT
GCCCTGGACCCACTGTCTGAGACCAAGTGTACCCTGAAATCCTTCACAGTGGAGAAGGGCATCTACCA
GACCAGCAACTTCAGGGTCCAACCAACAGAGAGCATTGTGAGGTTTCCAAACATCACCAACCTGTGTC
CATTTGGAGAGGTGTTCAATGCCACCAGGTTTGCCTCTGTCTATGCCTGGAACAGGAAGAGGATTAGC
AACTGTGTGGCTGACTACTCTGTGCTCTACAACTCTGCCTCCTTCAGCACCTTCAAGTGTTATGGAGT
GAGCCCAACCAAACTGAATGACCTGTGTTTCACCAATGTCTATGCTGACTCCTTTGTGATTAGGGGAG
ATGAGGTGAGACAGATTGCCCCTGGACAAACAGGCAAGATTGCTGACTACAACTACAAACTGCCTGAT
GACTTCACAGGCTGTGTGATTGCCTGGAACAGCAACAACCTGGACAGCAAGGTGGGAGGCAACTACAA
CTACCTCTACAGACTGTTCAGGAAGAGCAACCTGAAACCATTTGAGAGGGACATCAGCACAGAGATTT
ACCAGGCTGGCAGCACACCATGTAATGGAGTGGAGGGCTTCAACTGTTACTTTCCACTCCAATCCTAT
GGCTTCCAACCAACCAATGGAGTGGGCTACCAACCATACAGGGTGGTGGTGCTGTCCTTTGAACTGCT
CCATGCCCCTGCCACAGTGTGTGGACCAAAGAAGAGCACCAACCTGGTGAAGAACAAGTGTGTGAACT
TCAACTTCAATGGACTGACAGGCACAGGAGTGCTGACAGAGAGCAACAAGAAGTTCCTGCCATTCCAA
CAGTTTGGCAGGGACATTGCTGACACCACAGATGCTGTGAGGGACCCACAGACCTTGGAGATTCTGGA
CATCACACCATGTTCCTTTGGAGGAGTGTCTGTGATTACACCTGGCACCAACACCAGCAACCAGGTGG
CTGTGCTCTACCAGGATGTGAACTGTACTGAGGTGCCTGTGGCTATCCATGCTGACCAACTTACACCA
ACCTGGAGGGTCTACAGCACAGGCAGCAATGTGTTCCAGACCAGGGCTGGCTGTCTGATTGGAGCAGA
GCATGTGAACAACTCCTATGAGTGTGACATCCCAATTGGAGCAGGCATCTGTGCCTCCTACCAGACCC
AGACCAACAGCCCAAGGAGGGCAAGGTCTGTGGCAAGCCAGAGCATCATTGCCTACACAATGAGTCTG
GGAGCAGAGAACTCTGTGGCTTACAGCAACAACAGCATTGCCATCCCAACCAACTTCACCATCTCTGT
GACCACAGAGATTCTGCCTGTGAGTATGACCAAGACCTCTGTGGACTGTACAATGTATATCTGTGGAG
ACAGCACAGAGTGTAGCAACCTGCTGCTCCAATATGGCTCCTTCTGTACCCAACTTAACAGGGCTCTG
ACAGGCATTGCTGTGGAACAGGACAAGAACACCCAGGAGGTGTTTGCCCAGGTGAAGCAGATTTACAA
GACACCTCCAATCAAGGACTTTGGAGGCTTCAACTTCAGCCAGATTCTGCCTGACCCAAGCAAGCCAA
GCAAGAGGTCCTTCATTGAGGACCTGCTGTTCAACAAGGTGACCCTGGCTGATGCTGGCTTCATCAAG
CAATATGGAGACTGTCTGGGAGACATTGCTGCCAGGGACCTGATTTGTGCCCAGAAGTTCAATGGACT
GACAGTGCTGCCTCCACTGCTGACAGATGAGATGATTGCCCAATACACCTCTGCCCTGCTGGCTGGCA
CCATCACCTCTGGCTGGACCTTTGGAGCAGGAGCAGCCCTCCAAATCCCATTTGCTATGCAGATGGCT
TACAGGTTCAATGGCATTGGAGTGACCCAGAATGTGCTCTATGAGAACCAGAAACTGATTGCCAACCA
GTTCAACTCTGCCATTGGCAAGATTCAGGACTCCCTGTCCAGCACAGCCTCTGCCCTGGGCAAACTCC
AAGATGTGGTGAACCAGAATGCCCAGGCTCTGAACACCCTGGTGAAGCAACTTTCCAGCAACTTTGGA
GCCATCTCCTCTGTGCTGAATGACATCCTGAGCAGACTGGACcctcccGAGGCTGAGGTCCAGATTGA
CAGACTGATTACAGGCAGACTCCAATCCCTCCAAACCTATGTGACCCAACAACTTATCAGGGCTGCTG
AGATTAGGGCATCTGCCAACCTGGCTGCCACCAAGATGAGTGAGTGTGTGCTGGGACAAAGCAAGAGG
GTGGACTTCTGTGGCAAGGGCTACCACCTGATGAGTTTTCCACAGTCTGCCCCTCATGGAGTGGTGTT
CCTGCATGTGACCTATGTGCCTGCCCAGGAGAAGAACTTCACCACAGCCCCTGCCATCTGCCATGATG
GCAAGGCTCACTTTCCAAGGGAGGGAGTGTTTGTGAGCAATGGCACCCACTGGTTTGTGACCCAGAGG
AACTTCTATGAACCACAGATTATCACCACAGACAACACCTTTGTGTCTGGCAACTGTGATGTGGTGAT
TGGCATTGTGAACAACACAGTCTATGACCCACTCCAACCTGAACTGGACTCCTTCAAGGAGGAACTGG
ACAAATACTTCAAGAACCACACCAGCCCTGATGTGGACCTGGGAGACATCTCTGGCATCAATGCCTCT
GTGGTGAACATCCAGAAGGAGATTGACAGACTGAATGAGGTGGCTAAGAACCTGAATGAGTCCCTGAT
TGACCTCCAAGAACTGGGCAAAggcggaggcagcgggTATATTCCGGAGGCTCCAAGAGACGGTCAGG
CGTACGTACGGAAGGACGGCGAATGGGTTCTCTTGAGCACTTTCTTAggcCATCATCATCACCACCAT
ATGAAGGACAACACAGTCCCGCTGAAACTTATTGCGCTTCTCGCAAATGGAGAGTTCCACTCTGGAGA
GCAACTCGGCGAGACCCTGGGAATGAGTCGGGCGGCTATCAACAAGCATATACAGACTTTGAGGGATT
GGGGTGTGGATGTCTTCACTGTTCCGGGTAAGGGCTATTCACTGCCCGAACCGATCCAACTTCTCAAT
GCCAAACAGATATTGGGGCAACTTGATGGTGGCTCTGTCGCCGTGTTGCCGGTCATCGATAGCACGAA
CCAATATCTCTTGGACCGCATCGGAGAACTCAAGAGCGGAGACGCATGTATAGCGGAATATCAGCAAG
CCGGTAGAGGAAGAAGGGGACGGAAATGGTTCTCTCCATTCGGAGCCAACCTGTATTTGAGCATGTTC
TGGCGATTGGAGCAGGGACCAGCCGCCGCCATCGGTCTCTCTCTTGTCATAGGTATTGTCATGGCGGA
AGTCCTCCGCAAACTCGGGGCCGACAAAGTACGCGTGAAATGGCCGAACGACCTCTATCTTCAGGATA
GGAAATTGGCAGGGATATTGGTTGAACTGACGGGTAAGACGGGGGACGCCGCTCAGATTGTTATAGGT
GCCGGAATAAACATGGCCATGCGCAGAGTTGAAGAGTCAGTGGTAAACCAGGGTTGGATCACTCTCCA
AGAGGCGGGAATAAACCTGGATCGCAACACACTGGCTGCCATGCTTATACGGGAACTCCGAGCTGCAT
TGGAACTGTTCGAGCAAGAAGGGCTTGCTCCGTACTTGAGCAGGTGGGAAAAGCTGGATAATTTCATA
AATCGCCCTGTTAAACTCATCATCGGAGATAAAGAGATTTTTGGCATAAGTCGAGGAATCGATAAACA
AGGTGCATTGCTGCTTGAGCAAGACGGTATAATCAAACCTTGGATGGGTGGCGAAATCTCACTTAGAA
GCGCGGAAAAATATGAACAAggcagtggagagggcagaggaagtctgctaacatgcggtgacgtcgag
gagaatcctggcccaatgagtaaaggagaagctgtgattaaagagttcatgcgcttcaaagttcacat
ggagggttctatgaacggtcacgagttcgagatcgaaggcgaaggcgagggccgtccgtatgaaggca
cccagaccgccaaactgaaagtgactaaaggcggcccgctgcctttttcctgggacatcctgagcccg
caatttatgtacggttctagggcgttcaccaaacacccagcggatatcccggactattataagcagtc
ttttccggaaggtttcaagtgggaacgcgtaatgaattttgaagatggtggtgccgtgaccgtcactc
aggacacctccctggaggatggcaccctgatctataaagttaaactgcgtggtactaattttccacct
gatggcccggtgatgcagaaaaagacgatgggttgggaggcgtctaccgaacgcttgtatccggaaga
tggtgtgctgaaaggcgacattaaaatggccctgcgcctgaaagatggcggccgctatctggctgact
tcaaaaccacgtacaaagccaagaaacctgtgcagatgcctggcgcgtacaatgtggaccgcaaactg
gacatcacctctcataatgaagattatacggtggtagagcaatatgagcgctccgagggtcgtcattc
taccggtggcatggatgaactatacaaataagtttaaacccgctgatcagcctcgactgtgccttcta
gttgccagccatctgttgtttgcccctcccccgtgccttccttgaccctggaaggtgccactcccact
gtcctttcctaataaaatgaggaaattgcatcgcattgtctgagtaggtgtcattctattctgggggg
tggggtggggcaggacagcaagggggaggattgggaagacaatagcaggcatgctggggatgcggtgg
gctctatggcttctgaggcggaaagaaccagctggggctctagggggtatccccacgcgccctgtagc
ggcgcattaagcgcggcgggtgtggtggttacgcgcagcgtgaccgctacacttgccagcgccctagc
gcccgctcctttcgctttcttcccttcctttctcgccacgttcgccggctttccccgtcaagctctaa
atcgggggctccctttagggttccgatttagtgctttacggcacctcgaccccaaaaaacttgattag
ggtgatggttcacgtagtgggccatcgccctgatagacggtttttcgccctttgacgttggagtccac
gttctttaatagtggactcttgttccaaactggaacaacactcaaccctatctcggtctattcttttg
atttataagggattttgccgatttcggcctattggttaaaaaatgagctgatttaacaaaaatttaac
gcgaattaattctgtggaatgtgtgtcagttagggtgtggaaagtccccaggctccccagcaggcaga
agtatgcaaagcatgcatctcaattagtcagcaaccaggtgtggaaagtccccaggctccccagcagg
cagaagtatgcaaagcatgcatctcaattagtcagcaaccatagtcccgcccctaactccgcccatcc
cgcccctaactccgcccagttccgcccattctccgccccatggctgactaattttttttatttatgca
gaggccgaggccgcctctgcctctgagctattccagaagtagtgaggaggcttttttggaggcctagg
cttttgcaaaaagctcccgggagcttgtatatccattttcggatctgatcaagagacaggatgaggat
cgtttcgcatgattgaacaagatggattgcacgcaggttctccggccgcttgggtggagaggctattc
ggctatgactgggcacaacagacaatcggctgctctgatgccgccgtgttccggctgtcagcgcaggg
gcgcccggttctttttgtcaagaccgacctgtccggtgccctgaatgaactgcaggacgaggcagcgc
ggctatcgtggctggccacgacgggcgttccttgcgcagctgtgctcgacgttgtcactgaagcggga
agggactggctgctattgggcgaagtgccggggcaggatctcctgtcatctcaccttgctcctgccga
gaaagtatccatcatggctgatgcaatgcggcggctgcatacgcttgatccggctacctgcccattcg
accaccaagcgaaacatcgcatcgagcgagcacgtactcggatggaagccggtcttgtcgatcaggat
gatctggacgaagagcatcaggggctcgcgccagccgaactgttcgccaggctcaaggcgcgcatgcc
cgacggcgaggatctcgtcgtgacccatggcgatgcctgcttgccgaatatcatggtggaaaatggcc
gcttttctggattcatcgactgtggccggctgggtgtggcggaccgctatcaggacatagcgttggct
acccgtgatattgctgaagagcttggcggcgaatgggctgaccgcttcctcgtgctttacggtatcgc
cgctcccgattcgcagcgcatcgccttctatcgccttcttgacgagttcttctgagcgggactctggg
gttcgaaatgaccgaccaagcgacgcccaacctgccatcacgagatttcgattccaccgccgccttct
atgaaaggttgggcttcggaatcgttttccgggacgccggctggatgatcctccagcgcggggatctc
atgctggagttcttcgcccaccccaacttgtttattgcagcttataatggttacaaataaagcaatag
catcacaaatttcacaaataaagcatttttttcactgcattctagttgtggtttgtccaaactcatca
atgtatcttatcatgtctgtataccgtcgacctctagctagagcttggcgtaatcatggtcatagctg
tttcctgtgtgaaattgttatccgctcacaattccacacaacatacgagccggaagcataaagtgtaa
agcctggggtgcctaatgagtgagctaactcacattaattgcgttgcgctcactgcccgctttccagt
cgggaaacctgtcgtgccagctgcattaatgaatcggccaacgcgcggggagaggcggtttgcgtatt
gggcgctcttccgcttcctcgctcactgactcgctgcgctcggtcgttcggctgcggcgagcggtatc
agctcactcaaaggcggtaatacggttatccacagaatcaggggataacgcaggaaagaacatgtgag
caaaaggccagcaaaaggccaggaaccgtaaaaaggccgcgttgctggcgtttttccataggctccgc
ccccctgacgagcatcacaaaaatcgacgctcaagtcagaggtggcgaaacccgacaggactataaag
ataccaggcgtttccccctggaagctccctcgtgcgctctcctgttccgaccctgccgcttaccggat
acctgtccgcctttctcccttcgggaagcgtggcgctttctcatagctcacgctgtaggtatctcagt
tcggtgtaggtcgttcgctccaagctgggctgtgtgcacgaaccccccgttcagcccgaccgctgcgc
cttatccggtaactatcgtcttgagtccaacccggtaagacacgacttatcgccactggcagcagcca
ctggtaacaggattagcagagcgaggtatgtaggcggtgctacagagttcttgaagtggtggcctaac
tacggctacactagaagaacagtatttggtatctgcgctctgctgaagccagttaccttcggaaaaag
agttggtagctcttgatccggcaaacaaaccaccgctggtagcggtttttttgtttgcaagcagcaga
ttacgcgcagaaaaaaaggatctcaagaagatcctttgatcttttctacggggtctgacgctcagtgg
aacgaaaactcacgttaagggattttggtcatgagattatcaaaaaggatcttcacctagatcctttt
aaattaaaaatgaagttttaaatcaatctaaagtatatatgagtaaacttggtctgacagttaccaat
gcttaatcagtgaggcacctatctcagcgatctgtctatttcgttcatccatagttgcctgactcccc
gtcgtgtagataactacgatacgggagggcttaccatctggccccagtgctgcaatgataccgcgaga
cccacgctcaccggctccagatttatcagcaataaaccagccagccggaagggccgagcgcagaagtg
gtcctgcaactttatccgcctccatccagtctattaattgttgccgggaagctagagtaagtagttcg
ccagttaatagtttgcgcaacgttgttgccattgctacaggcatcgtggtgtcacgctcgtcgtttgg
tatggcttcattcagctccggttcccaacgatcaaggcgagttacatgatcccccatgttgtgcaaaa
aagcggttagctccttcggtcctccgatcgttgtcagaagtaagttggccgcagtgttatcactcatg
gttatggcagcactgcataattctcttactgtcatgccatccgtaagatgcttttctgtgactggtga
gtactcaaccaagtcattctgagaatagtgtatgcggcgaccgagttgctcttgcccggcgtcaatac
gggataataccgcgccacatagcagaactttaaaagtgctcatcattggaaaacgttcttcggggcga
aaactctcaaggatcttaccgctgttgagatccagttcgatgtaacccactcgtgcacccaactgatc
ttcagcatcttttactttcaccagcgtttctgggtgagcaaaaacaggaaggcaaaatgccgcaaaaa
agggaataagggcgacacggaaatgttgaatactcatactcttcctttttcaatattattgaagcatt
tatcagggttattgtctcatgagcggatacatatttgaatgtatttagaaaaataaacaaataggggt
tccgcgcacatttccccgaaaagtgccacctgacgtc
pMD138-pcDNA3.1-SARS2_mut_v1-GGSG-foldon-G-6xHis-BirA-T2A-mScarlet
SEQ ID NO: 115
gacggatcgggagatctcccgatcccctatggtgcactctcagtacaatctgctctgatgccgcatag
ttaagccagtatctgctccctgcttgtgtgttggaggtcgctgagtagtgcgcgagcaaaatttaagc
tacaacaaggcaaggcttgaccgacaattgcatgaagaatctgcttagggttaggcgttttgcgctgc
ttcgcgatgtacgggccagatatacgcgttgacattgattattgactagttattaatagtaatcaatt
acggggtcattagttcatagcccatatatggagttccgcgttacataacttacggtaaatggcccgcc
tggctgaccgcccaacgacccccgcccattgacgtcaataatgacgtatgttcccatagtaacgccaa
tagggactttccattgacgtcaatgggtggagtatttacggtaaactgcccacttggcagtacatcaa
gtgtatcatatgccaagtacgccccctattgacgtcaatgacggtaaatggcccgcctggcattatgc
ccagtacatgaccttatgggactttcctacttggcagtacatctacgtattagtcatcgctattacca
tggtgatgcggttttggcagtacatcaatgggcgtggatagcggtttgactcacggggatttccaagt
ctccaccccattgacgtcaatgggagtttgttttggcaccaaaatcaacgggactttccaaaatgtcg
taacaactccgccccattgacgcaaatgggcggtaggcgtgtacggtgggaggtctatataagcagag
ctctctggctaactagagaacccactgcttactggcttatcgaaattaatacgactcactatagggag
acccaagctggATGTTTGTGTTCCTGGTGCTGCTGCCACTGGTGTCCAGCCAGTGTGTGAACCTGACC
ACCAGGACCCAACTTCCTCCTGCCTACACCAACTCCTTCACCAGGGGAGTCTACTACCCTGACAAGGT
GTTCAGGTCCTCTGTGCTGCACAGCACCCAGGACCTGTTCCTGCCATTCTTCAGCAATGTGACCTGGT
TCCATGCCATCCATGTGTCTGGCACCAATGGCACCAAGAGGTTTGACAACCCTGTGCTGCCATTCAAT
GATGGAGTCTACTTTGCCAGCACAGAGAAGAGCAACATCATCAGGGGCTGGATTTTTGGCACCACCCT
GGACAGCAAGACCCAGTCCCTGCTGATTGTGAACAATGCCACCAATGTGGTGATTAAGGTGTGTGAGT
TCCAGTTCTGTAATGACCCATTCCTGGGAGTCTACTACCACAAGAACAACAAGTCCTGGATGGAGTCT
GAGTTCAGGGTCTACTCCTCTGCCAACAACTGTACCTTTGAATATGTGAGCCAACCATTCCTGATGGA
CTTGGAGGGCAAGCAGGGCAACTTCAAGAACCTGAGGGAGTTTGTGTTCAAGAACATTGATGGCTACT
TCAAGATTTACAGCAAACACACACCAATCAACCTGGTGAGGGACCTGCCACAGGGCTTCTCTGCCTTG
GAACCACTGGTGGACCTGCCAATTGGCATCAACATCACCAGGTTCCAGACCCTGCTGGCTCTGCACAG
GTCCTACCTGACACCTGGAGACTCCTCCTCTGGCTGGACAGCAGGAGCAGCAGCCTACTATGTGGGCT
ACCTCCAACCAAGGACCTTCCTGCTGAAATACAATGAGAATGGCACCATCACAGATGCTGAGGGCAAG
CAGGGCAACTTCAAGAACCTGAGGGAGTTTGTGTTCAAGAACATTGATGGCTACTTCAAGATTTACAG
CAAACACACACCAATCAACCTGGTGAGGGACCTGCCACAGGGCTTCTCTGCCTTGGAACCACTGGTGG
ACCTGCCAATTGGCATCAACATCACCAGGTTCCAGACCCTGCTGGCTCTGCACAGGTCCTACCTGACA
CCTGGAGACTCCTCCTCTGGCTGGACAGCAGGAGCAGCAGCCTACTATGTGGGCTACCTCCAACCAAG
GACCTTCCTGCTGAAATACAATGAGAATGGCACCATCACAGATGCTGTGGACTGTGCCCTGGACCCAC
TGTCTGAGACCAAGTGTACCCTGAAATCCTTCACAGTGGAGAAGGGCATCTACCAGACCAGCAACTTC
AGGGTCCAACCAACAGAGAGCATTGTGAGGTTTCCAAACATCACCAACCTGTGTCCATTTGGAGAGGT
GTTCAATGCCACCAGGTTTGCCTCTGTCTATGCCTGGAACAGGAAGAGGATTAGCAACTGTGTGGCTG
ACTACTCTGTGCTCTACAACTCTGCCTCCTTCAGCACCTTCAAGTGTTATGGAGTGAGCCCAACCAAA
CTGAATGACCTGTGTTTCACCAATGTCTATGCTGACTCCTTTGTGATTAGGGGAGATGAGGTGAGACA
GATTGCCCCTGGACAAACAGGCAAGATTGCTGACTACAACTACAAACTGCCTGATGACTTCACAGGCT
GTGTGATTGCCTGGAACAGCgccAACCTGGACAGCAAGGTGGGAGGCAACgccAACTACCTCTACAGA
CTGTTCAGGAAGAGCAACCTGAAACCATTTGAGAGGGACATCAGCACAGAGATTTACCAGGCTGGCAG
CACACCATGTAATGGAGTGGAGGGCTTCAACTGTTACTTTCCACTCCAATCCTATGGCTTCgccCCAg
ctgccGGAGTGGGCTACCAACCATACAGGGTGGTGGTGCTGTCCTTTGAACTGCTCCATGCCCCTGCC
ACAGTGTGTGGACCAAAGAAGAGCACCAACCTGGTGAAGAACAAGTGTGTGAACTTCAACTTCAATGG
ACTGACAGGCACAGGAGTGCTGACAGAGAGCAACAAGAAGTTCCTGCCATTCCAACAGTTTGGCAGGG
ACATTGCTGACACCACAGATGCTGTGAGGGACCCACAGACCTTGGAGATTCTGGACATCACACCATGT
TCCTTTGGAGGAGTGTCTGTGATTACACCTGGCACCAACACCAGCAACCAGGTGGCTGTGCTCTACCA
GGATGTGAACTGTACTGAGGTGCCTGTGGCTATCCATGCTGACCAACTTACACCAACCTGGAGGGTCT
ACAGCACAGGCAGCAATGTGTTCCAGACCAGGGCTGGCTGTCTGATTGGAGCAGAGCATGTGAACAAC
TCCTATGAGTGTGACATCCCAATTGGAGCAGGCATCTGTGCCTCCTACCAGACCCAGACCAACAGCCC
AAGGAGGGCAAGGTCTGTGGCAAGCCAGAGCATCATTGCCTACACAATGAGTCTGGGAGCAGAGAACT
CTGTGGCTTACAGCAACAACAGCATTGCCATCCCAACCAACTTCACCATCTCTGTGACCACAGAGATT
CTGCCTGTGAGTATGACCAAGACCTCTGTGGACTGTACAATGTATATCTGTGGAGACAGCACAGAGTG
TAGCAACCTGCTGCTCCAATATGGCTCCTTCTGTACCCAACTTAACAGGGCTCTGACAGGCATTGCTG
TGGAACAGGACAAGAACACCCAGGAGGTGTTTGCCCAGGTGAAGCAGATTTACAAGACACCTCCAATC
AAGGACTTTGGAGGCTTCAACTTCAGCCAGATTCTGCCTGACCCAAGCAAGCCAAGCAAGAGGTCCTT
CATTGAGGACCTGCTGTTCAACAAGGTGACCCTGGCTGATGCTGGCTTCATCAAGCAATATGGAGACT
GTCTGGGAGACATTGCTGCCAGGGACCTGATTTGTGCCCAGAAGTTCAATGGACTGACAGTGCTGCCT
CCACTGCTGACAGATGAGATGATTGCCCAATACACCTCTGCCCTGCTGGCTGGCACCATCACCTCTGG
CTGGACCTTTGGAGCAGGAGCAGCCCTCCAAATCCCATTTGCTATGCAGATGGCTTACAGGTTCAATG
GCATTGGAGTGACCCAGAATGTGCTCTATGAGAACCAGAAACTGATTGCCAACCAGTTCAACTCTGCC
ATTGGCAAGATTCAGGACTCCCTGTCCAGCACAGCCTCTGCCCTGGGCAAACTCCAAGATGTGGTGAA
CCAGAATGCCCAGGCTCTGAACACCCTGGTGAAGCAACTTTCCAGCAACTTTGGAGCCATCTCCTCTG
TGCTGAATGACATCCTGAGCAGACTGGACcctcccGAGGCTGAGGTCCAGATTGACAGACTGATTACA
GGCAGACTCCAATCCCTCCAAACCTATGTGACCCAACAACTTATCAGGGCTGCTGAGATTAGGGCATC
TGCCAACCTGGCTGCCACCAAGATGAGTGAGTGTGTGCTGGGACAAAGCAAGAGGGTGGACTTCTGTG
GCAAGGGCTACCACCTGATGAGTTTTCCACAGTCTGCCCCTCATGGAGTGGTGTTCCTGCATGTGACC
TATGTGCCTGCCCAGGAGAAGAACTTCACCACAGCCCCTGCCATCTGCCATGATGGCAAGGCTCACTT
TCCAAGGGAGGGAGTGTTTGTGAGCAATGGCACCCACTGGTTTGTGACCCAGAGGAACTTCTATGAAC
CACAGATTATCACCACAGACAACACCTTTGTGTCTGGCAACTGTGATGTGGTGATTGGCATTGTGAAC
AACACAGTCTATGACCCACTCCAACCTGAACTGGACTCCTTCAAGGAGGAACTGGACAAATACTTCAA
GAACCACACCAGCCCTGATGTGGACCTGGGAGACATCTCTGGCATCAATGCCTCTGTGGTGAACATCC
AGAAGGAGATTGACAGACTGAATGAGGTGGCTAAGAACCTGAATGAGTCCCTGATTGACCTCCAAGAA
CTGGGCAAAggcggaggcagcgggTATATTCCGGAGGCTCCAAGAGACGGTCAGGCGTACGTACGGAA
GGACGGCGAATGGGTTCTCTTGAGCACTTTCTTAggcCATCATCATCACCACCATATGAAGGACAACA
CAGTCCCGCTGAAACTTATTGCGCTTCTCGCAAATGGAGAGTTCCACTCTGGAGAGCAACTCGGCGAG
ACCCTGGGAATGAGTCGGGCGGCTATCAACAAGCATATACAGACTTTGAGGGATTGGGGTGTGGATGT
CTTCACTGTTCCGGGTAAGGGCTATTCACTGCCCGAACCGATCCAACTTCTCAATGCCAAACAGATAT
TGGGGCAACTTGATGGTGGCTCTGTCGCCGTGTTGCCGGTCATCGATAGCACGAACCAATATCTCTTG
GACCGCATCGGAGAACTCAAGAGCGGAGACGCATGTATAGCGGAATATCAGCAAGCCGGTAGAGGAAG
AAGGGGACGGAAATGGTTCTCTCCATTCGGAGCCAACCTGTATTTGAGCATGTTCTGGCGATTGGAGC
AGGGACCAGCCGCCGCCATCGGTCTCTCTCTTGTCATAGGTATTGTCATGGCGGAAGTCCTCCGCAAA
CTCGGGGCCGACAAAGTACGCGTGAAATGGCCGAACGACCTCTATCTTCAGGATAGGAAATTGGCAGG
GATATTGGTTGAACTGACGGGTAAGACGGGGGACGCCGCTCAGATTGTTATAGGTGCCGGAATAAACA
TGGCCATGCGCAGAGTTGAAGAGTCAGTGGTAAACCAGGGTTGGATCACTCTCCAAGAGGCGGGAATA
AACCTGGATCGCAACACACTGGCTGCCATGCTTATACGGGAACTCCGAGCTGCATTGGAACTGTTCGA
GCAAGAAGGGCTTGCTCCGTACTTGAGCAGGTGGGAAAAGCTGGATAATTTCATAAATCGCCCTGTTA
AACTCATCATCGGAGATAAAGAGATTTTTGGCATAAGTCGAGGAATCGATAAACAAGGTGCATTGCTG
CTTGAGCAAGACGGTATAATCAAACCTTGGATGGGTGGCGAAATCTCACTTAGAAGCGCGGAAAAATA
TGAACAAggcagtggagagggcagaggaagtctgctaacatgcggtgacgtcgaggagaatcctggcc
caatgagtaaaggagaagctgtgattaaagagttcatgcgcttcaaagttcacatggagggttctatg
aacggtcacgagttcgagatcgaaggcgaaggcgagggccgtccgtatgaaggcacccagaccgccaa
actgaaagtgactaaaggcggcccgctgcctttttcctgggacatcctgagcccgcaatttatgtacg
gttctagggcgttcaccaaacacccagcggatatcccggactattataagcagtcttttccggaaggt
ttcaagtgggaacgcgtaatgaattttgaagatggtggtgccgtgaccgtcactcaggacacctccct
ggaggatggcaccctgatctataaagttaaactgcgtggtactaattttccacctgatggcccggtga
tgcagaaaaagacgatgggttgggaggcgtctaccgaacgcttgtatccggaagatggtgtgctgaaa
ggcgacattaaaatggccctgcgcctgaaagatggcggccgctatctggctgacttcaaaaccacgta
caaagccaagaaacctgtgcagatgcctggcgcgtacaatgtggaccgcaaactggacatcacctctc
ataatgaagattatacggtggtagagcaatatgagcgctccgagggtcgtcattctaccggtggcatg
gatgaactatacaaataagtttaaacccgctgatcagcctcgactgtgccttctagttgccagccatc
tgttgtttgcccctcccccgtgccttccttgaccctggaaggtgccactcccactgtcctttcctaat
aaaatgaggaaattgcatcgcattgtctgagtaggtgtcattctattctggggggtggggtggggcag
gacagcaagggggaggattgggaagacaatagcaggcatgctggggatgcggtgggctctatggcttc
tgaggcggaaagaaccagctggggctctagggggtatccccacgcgccctgtagcggcgcattaagcg
cggcgggtgtggtggttacgcgcagcgtgaccgctacacttgccagcgccctagcgcccgctcctttc
gctttcttcccttcctttctcgccacgttcgccggctttccccgtcaagctctaaatcgggggctccc
tttagggttccgatttagtgctttacggcacctcgaccccaaaaaacttgattagggtgatggttcac
gtagtgggccatcgccctgatagacggtttttcgccctttgacgttggagtccacgttctttaatagt
ggactcttgttccaaactggaacaacactcaaccctatctcggtctattcttttgatttataagggat
tttgccgatttcggcctattggttaaaaaatgagctgatttaacaaaaatttaacgcgaattaattct
gtggaatgtgtgtcagttagggtgtggaaagtccccaggctccccagcaggcagaagtatgcaaagca
tgcatctcaattagtcagcaaccaggtgtggaaagtccccaggctccccagcaggcagaagtatgcaa
agcatgcatctcaattagtcagcaaccatagtcccgcccctaactccgcccatcccgcccctaactcc
gcccagttccgcccattctccgccccatggctgactaattttttttatttatgcagaggccgaggccg
cctctgcctctgagctattccagaagtagtgaggaggcttttttggaggcctaggcttttgcaaaaag
ctcccgggagcttgtatatccattttcggatctgatcaagagacaggatgaggatcgtttcgcatgat
tgaacaagatggattgcacgcaggttctccggccgcttgggtggagaggctattcggctatgactggg
cacaacagacaatcggctgctctgatgccgccgtgttccggctgtcagcgcaggggcgcccggttctt
tttgtcaagaccgacctgtccggtgccctgaatgaactgcaggacgaggcagcgcggctatcgtggct
ggccacgacgggcgttccttgcgcagctgtgctcgacgttgtcactgaagcgggaagggactggctgc
tattgggcgaagtgccggggcaggatctcctgtcatctcaccttgctcctgccgagaaagtatccatc
atggctgatgcaatgcggcggctgcatacgcttgatccggctacctgcccattcgaccaccaagcgaa
acatcgcatcgagcgagcacgtactcggatggaagccggtcttgtcgatcaggatgatctggacgaag
agcatcaggggctcgcgccagccgaactgttcgccaggctcaaggcgcgcatgcccgacggcgaggat
ctcgtcgtgacccatggcgatgcctgcttgccgaatatcatggtggaaaatggccgcttttctggatt
catcgactgtggccggctgggtgtggcggaccgctatcaggacatagcgttggctacccgtgatattg
ctgaagagcttggcggcgaatgggctgaccgcttcctcgtgctttacggtatcgccgctcccgattcg
cagcgcatcgccttctatcgccttcttgacgagttcttctgagcgggactctggggttcgaaatgacc
gaccaagcgacgcccaacctgccatcacgagatttcgattccaccgccgccttctatgaaaggttggg
cttcggaatcgttttccgggacgccggctggatgatcctccagcgcggggatctcatgctggagttct
tcgcccaccccaacttgtttattgcagcttataatggttacaaataaagcaatagcatcacaaatttc
acaaataaagcatttttttcactgcattctagttgtggtttgtccaaactcatcaatgtatcttatca
tgtctgtataccgtcgacctctagctagagcttggcgtaatcatggtcatagctgtttcctgtgtgaa
attgttatccgctcacaattccacacaacatacgagccggaagcataaagtgtaaagcctggggtgcc
taatgagtgagctaactcacattaattgcgttgcgctcactgcccgctttccagtcgggaaacctgtc
gtgccagctgcattaatgaatcggccaacgcgcggggagaggcggtttgcgtattgggcgctcttccg
cttcctcgctcactgactcgctgcgctcggtcgttcggctgcggcgagcggtatcagctcactcaaag
gcggtaatacggttatccacagaatcaggggataacgcaggaaagaacatgtgagcaaaaggccagca
aaaggccaggaaccgtaaaaaggccgcgttgctggcgtttttccataggctccgcccccctgacgagc
atcacaaaaatcgacgctcaagtcagaggtggcgaaacccgacaggactataaagataccaggcgttt
ccccctggaagctccctcgtgcgctctcctgttccgaccctgccgcttaccggatacctgtccgcctt
tctcccttcgggaagcgtggcgctttctcatagctcacgctgtaggtatctcagttcggtgtaggtcg
ttcgctccaagctgggctgtgtgcacgaaccccccgttcagcccgaccgctgcgccttatccggtaac
tatcgtcttgagtccaacccggtaagacacgacttatcgccactggcagcagccactggtaacaggat
tagcagagcgaggtatgtaggcggtgctacagagttcttgaagtggtggcctaactacggctacacta
gaagaacagtatttggtatctgcgctctgctgaagccagttaccttcggaaaaagagttggtagctct
tgatccggcaaacaaaccaccgctggtagcggtttttttgtttgcaagcagcagattacgcgcagaaa
aaaaggatctcaagaagatcctttgatcttttctacggggtctgacgctcagtggaacgaaaactcac
gttaagggattttggtcatgagattatcaaaaaggatcttcacctagatccttttaaattaaaaatga
agttttaaatcaatctaaagtatatatgagtaaacttggtctgacagttaccaatgcttaatcagtga
ggcacctatctcagcgatctgtctatttcgttcatccatagttgcctgactccccgtcgtgtagataa
ctacgatacgggagggcttaccatctggccccagtgctgcaatgataccgcgagacccacgctcaccg
gctccagatttatcagcaataaaccagccagccggaagggccgagcgcagaagtggtcctgcaacttt
atccgcctccatccagtctattaattgttgccgggaagctagagtaagtagttcgccagttaatagtt
tgcgcaacgttgttgccattgctacaggcatcgtggtgtcacgctcgtcgtttggtatggcttcattc
agctccggttcccaacgatcaaggcgagttacatgatcccccatgttgtgcaaaaaagcggttagctc
cttcggtcctccgatcgttgtcagaagtaagttggccgcagtgttatcactcatggttatggcagcac
tgcataattctcttactgtcatgccatccgtaagatgcttttctgtgactggtgagtactcaaccaag
tcattctgagaatagtgtatgcggcgaccgagttgctcttgcccggcgtcaatacgggataataccgc
gccacatagcagaactttaaaagtgctcatcattggaaaacgttcttcggggcgaaaactctcaagga
tcttaccgctgttgagatccagttcgatgtaacccactcgtgcacccaactgatcttcagcatctttt
actttcaccagcgtttctgggtgagcaaaaacaggaaggcaaaatgccgcaaaaaagggaataagggc
gacacggaaatgttgaatactcatactcttcctttttcaatattattgaagcatttatcagggttatt
gtctcatgagcggatacatatttgaatgtatttagaaaaataaacaaataggggttccgcgcacattt
ccccgaaaagtgccacctgacgtc
pMD139-pcDNA3.1-SARS2_mut_v2-GGSG-foldon-G-6xHis-BirA-T2A-mScarlet
SEQ ID NO: 116
gacggatcgggagatctcccgatcccctatggtgcactctcagtacaatctgctctgatgccgcatag
ttaagccagtatctgctccctgcttgtgtgttggaggtcgctgagtagtgcgcgagcaaaatttaagc
tacaacaaggcaaggcttgaccgacaattgcatgaagaatctgcttagggttaggcgttttgcgctgc
ttcgcgatgtacgggccagatatacgcgttgacattgattattgactagttattaatagtaatcaatt
acggggtcattagttcatagcccatatatggagttccgcgttacataacttacggtaaatggcccgcc
tggctgaccgcccaacgacccccgcccattgacgtcaataatgacgtatgttcccatagtaacgccaa
tagggactttccattgacgtcaatgggtggagtatttacggtaaactgcccacttggcagtacatcaa
gtgtatcatatgccaagtacgccccctattgacgtcaatgacggtaaatggcccgcctggcattatgc
ccagtacatgaccttatgggactttcctacttggcagtacatctacgtattagtcatcgctattacca
tggtgatgcggttttggcagtacatcaatgggcgtggatagcggtttgactcacggggatttccaagt
ctccaccccattgacgtcaatgggagtttgttttggcaccaaaatcaacgggactttccaaaatgtcg
taacaactccgccccattgacgcaaatgggcggtaggcgtgtacggtgggaggtctatataagcagag
ctctctggctaactagagaacccactgcttactggcttatcgaaattaatacgactcactatagggag
acccaagctggATGTTTGTGTTCCTGGTGCTGCTGCCACTGGTGTCCAGCCAGTGTGTGAACCTGACC
ACCAGGACCCAACTTCCTCCTGCCTACACCAACTCCTTCACCAGGGGAGTCTACTACCCTGACAAGGT
GTTCAGGTCCTCTGTGCTGCACAGCACCCAGGACCTGTTCCTGCCATTCTTCAGCAATGTGACCTGGT
TCCATGCCATCCATGTGTCTGGCACCAATGGCACCAAGAGGTTTGACAACCCTGTGCTGCCATTCAAT
GATGGAGTCTACTTTGCCAGCACAGAGAAGAGCAACATCATCAGGGGCTGGATTTTTGGCACCACCCT
GGACAGCAAGACCCAGTCCCTGCTGATTGTGAACAATGCCACCAATGTGGTGATTAAGGTGTGTGAGT
TCCAGTTCTGTAATGACCCATTCCTGGGAGTCTACTACCACAAGAACAACAAGTCCTGGATGGAGTCT
GAGTTCAGGGTCTACTCCTCTGCCAACAACTGTACCTTTGAATATGTGAGCCAACCATTCCTGATGGA
CTTGGAGGGCAAGCAGGGCAACTTCAAGAACCTGAGGGAGTTTGTGTTCAAGAACATTGATGGCTACT
TCAAGATTTACAGCAAACACACACCAATCAACCTGGTGAGGGACCTGCCACAGGGCTTCTCTGCCTTG
GAACCACTGGTGGACCTGCCAATTGGCATCAACATCACCAGGTTCCAGACCCTGCTGGCTCTGCACAG
GTCCTACCTGACACCTGGAGACTCCTCCTCTGGCTGGACAGCAGGAGCAGCAGCCTACTATGTGGGCT
ACCTCCAACCAAGGACCTTCCTGCTGAAATACAATGAGAATGGCACCATCACAGATGCTGAGGGCAAG
CAGGGCAACTTCAAGAACCTGAGGGAGTTTGTGTTCAAGAACATTGATGGCTACTTCAAGATTTACAG
CAAACACACACCAATCAACCTGGTGAGGGACCTGCCACAGGGCTTCTCTGCCTTGGAACCACTGGTGG
ACCTGCCAATTGGCATCAACATCACCAGGTTCCAGACCCTGCTGGCTCTGCACAGGTCCTACCTGACA
CCTGGAGACTCCTCCTCTGGCTGGACAGCAGGAGCAGCAGCCTACTATGTGGGCTACCTCCAACCAAG
GACCTTCCTGCTGAAATACAATGAGAATGGCACCATCACAGATGCTGTGGACTGTGCCCTGGACCCAC
TGTCTGAGACCAAGTGTACCCTGAAATCCTTCACAGTGGAGAAGGGCATCTACCAGACCAGCAACTTC
AGGGTCCAACCAACAGAGAGCATTGTGAGGTTTCCAAACATCACCAACCTGTGTCCATTTGGAGAGGT
GTTCAATGCCACCAGGTTTGCCTCTGTCTATGCCTGGAACAGGAAGAGGATTAGCAACTGTGTGGCTG
ACTACTCTGTGCTCTACAACTCTGCCTCCTTCAGCACCTTCAAGTGTTATGGAGTGAGCCCAACCAAA
CTGAATGACCTGTGTTTCACCAATGTCTATGCTGACTCCTTTGTGATTAGGGGAGATGAGGTGAGACA
GATTGCCCCTGGACAAACAGGCgccATTGCTGACTACAACTACAAACTGCCTGATGACTTCACAGGCT
GTGTGATTGCCTGGAACAGCAACAACCTGGACAGCAAGGTGGGAGGCAACTACAACTACCTCTACAGA
gccgctAGGAAGAGCAACCTGAAACCATTTGAGAGGGACATCAGCACAGAGATTgccCAGGCTGGCAG
CACACCATGTAATGGAGTGGAGGGCTTCAACTGTTACTTTCCACTCgccTCCTATGGCTTCCAACCAA
CCAATGGAGTGGGCTACCAACCATACAGGGTGGTGGTGCTGTCCTTTGAACTGCTCCATGCCCCTGCC
ACAGTGTGTGGACCAAAGAAGAGCACCAACCTGGTGAAGAACAAGTGTGTGAACTTCAACgccAATGG
ACTGACAGGCACAGGAGTGCTGACAGAGAGCAACAAGAAGTTCCTGCCATTCCAACAGTTTGGCAGGG
ACATTGCTGACACCACAGATGCTGTGAGGGACCCACAGACCTTGGAGATTCTGGACATCACACCATGT
TCCTTTGGAGGAGTGTCTGTGATTACACCTGGCACCAACACCAGCAACCAGGTGGCTGTGCTCTACCA
GGATGTGAACTGTACTGAGGTGCCTGTGGCTATCCATGCTGACCAACTTACACCAACCTGGAGGGTCT
ACAGCACAGGCAGCAATGTGTTCCAGACCAGGGCTGGCTGTCTGATTGGAGCAGAGCATGTGAACAAC
TCCTATGAGTGTGACATCCCAATTGGAGCAGGCATCTGTGCCTCCTACCAGACCCAGACCAACAGCCC
AAGGAGGGCAAGGTCTGTGGCAAGCCAGAGCATCATTGCCTACACAATGAGTCTGGGAGCAGAGAACT
CTGTGGCTTACAGCAACAACAGCATTGCCATCCCAACCAACTTCACCATCTCTGTGACCACAGAGATT
CTGCCTGTGAGTATGACCAAGACCTCTGTGGACTGTACAATGTATATCTGTGGAGACAGCACAGAGTG
TAGCAACCTGCTGCTCCAATATGGCTCCTTCTGTACCCAACTTAACAGGGCTCTGACAGGCATTGCTG
TGGAACAGGACAAGAACACCCAGGAGGTGTTTGCCCAGGTGAAGCAGATTTACAAGACACCTCCAATC
AAGGACTTTGGAGGCTTCAACTTCAGCCAGATTCTGCCTGACCCAAGCAAGCCAAGCAAGAGGTCCTT
CATTGAGGACCTGCTGTTCAACAAGGTGACCCTGGCTGATGCTGGCTTCATCAAGCAATATGGAGACT
GTCTGGGAGACATTGCTGCCAGGGACCTGATTTGTGCCCAGAAGTTCAATGGACTGACAGTGCTGCCT
CCACTGCTGACAGATGAGATGATTGCCCAATACACCTCTGCCCTGCTGGCTGGCACCATCACCTCTGG
CTGGACCTTTGGAGCAGGAGCAGCCCTCCAAATCCCATTTGCTATGCAGATGGCTTACAGGTTCAATG
GCATTGGAGTGACCCAGAATGTGCTCTATGAGAACCAGAAACTGATTGCCAACCAGTTCAACTCTGCC
ATTGGCAAGATTCAGGACTCCCTGTCCAGCACAGCCTCTGCCCTGGGCAAACTCCAAGATGTGGTGAA
CCAGAATGCCCAGGCTCTGAACACCCTGGTGAAGCAACTTTCCAGCAACTTTGGAGCCATCTCCTCTG
TGCTGAATGACATCCTGAGCAGACTGGACcctcccGAGGCTGAGGTCCAGATTGACAGACTGATTACA
GGCAGACTCCAATCCCTCCAAACCTATGTGACCCAACAACTTATCAGGGCTGCTGAGATTAGGGCATC
TGCCAACCTGGCTGCCACCAAGATGAGTGAGTGTGTGCTGGGACAAAGCAAGAGGGTGGACTTCTGTG
GCAAGGGCTACCACCTGATGAGTTTTCCACAGTCTGCCCCTCATGGAGTGGTGTTCCTGCATGTGACC
TATGTGCCTGCCCAGGAGAAGAACTTCACCACAGCCCCTGCCATCTGCCATGATGGCAAGGCTCACTT
TCCAAGGGAGGGAGTGTTTGTGAGCAATGGCACCCACTGGTTTGTGACCCAGAGGAACTTCTATGAAC
CACAGATTATCACCACAGACAACACCTTTGTGTCTGGCAACTGTGATGTGGTGATTGGCATTGTGAAC
AACACAGTCTATGACCCACTCCAACCTGAACTGGACTCCTTCAAGGAGGAACTGGACAAATACTTCAA
GAACCACACCAGCCCTGATGTGGACCTGGGAGACATCTCTGGCATCAATGCCTCTGTGGTGAACATCC
AGAAGGAGATTGACAGACTGAATGAGGTGGCTAAGAACCTGAATGAGTCCCTGATTGACCTCCAAGAA
CTGGGCAAAggcggaggcagcgggTATATTCCGGAGGCTCCAAGAGACGGTCAGGCGTACGTACGGAA
GGACGGCGAATGGGTTCTCTTGAGCACTTTCTTAggcCATCATCATCACCACCATATGAAGGACAACA
CAGTCCCGCTGAAACTTATTGCGCTTCTCGCAAATGGAGAGTTCCACTCTGGAGAGCAACTCGGCGAG
ACCCTGGGAATGAGTCGGGCGGCTATCAACAAGCATATACAGACTTTGAGGGATTGGGGTGTGGATGT
CTTCACTGTTCCGGGTAAGGGCTATTCACTGCCCGAACCGATCCAACTTCTCAATGCCAAACAGATAT
TGGGGCAACTTGATGGTGGCTCTGTCGCCGTGTTGCCGGTCATCGATAGCACGAACCAATATCTCTTG
GACCGCATCGGAGAACTCAAGAGCGGAGACGCATGTATAGCGGAATATCAGCAAGCCGGTAGAGGAAG
AAGGGGACGGAAATGGTTCTCTCCATTCGGAGCCAACCTGTATTTGAGCATGTTCTGGCGATTGGAGC
AGGGACCAGCCGCCGCCATCGGTCTCTCTCTTGTCATAGGTATTGTCATGGCGGAAGTCCTCCGCAAA
CTCGGGGCCGACAAAGTACGCGTGAAATGGCCGAACGACCTCTATCTTCAGGATAGGAAATTGGCAGG
GATATTGGTTGAACTGACGGGTAAGACGGGGGACGCCGCTCAGATTGTTATAGGTGCCGGAATAAACA
TGGCCATGCGCAGAGTTGAAGAGTCAGTGGTAAACCAGGGTTGGATCACTCTCCAAGAGGCGGGAATA
AACCTGGATCGCAACACACTGGCTGCCATGCTTATACGGGAACTCCGAGCTGCATTGGAACTGTTCGA
GCAAGAAGGGCTTGCTCCGTACTTGAGCAGGTGGGAAAAGCTGGATAATTTCATAAATCGCCCTGTTA
AACTCATCATCGGAGATAAAGAGATTTTTGGCATAAGTCGAGGAATCGATAAACAAGGTGCATTGCTG
CTTGAGCAAGACGGTATAATCAAACCTTGGATGGGTGGCGAAATCTCACTTAGAAGCGCGGAAAAATA
TGAACAAggcagtggagagggcagaggaagtctgctaacatgcggtgacgtcgaggagaatcctggcc
caatgagtaaaggagaagctgtgattaaagagttcatgcgcttcaaagttcacatggagggttctatg
aacggtcacgagttcgagatcgaaggcgaaggcgagggccgtccgtatgaaggcacccagaccgccaa
actgaaagtgactaaaggcggcccgctgcctttttcctgggacatcctgagcccgcaatttatgtacg
gttctagggcgttcaccaaacacccagcggatatcccggactattataagcagtcttttccggaaggt
ttcaagtgggaacgcgtaatgaattttgaagatggtggtgccgtgaccgtcactcaggacacctccct
ggaggatggcaccctgatctataaagttaaactgcgtggtactaattttccacctgatggcccggtga
tgcagaaaaagacgatgggttgggaggcgtctaccgaacgcttgtatccggaagatggtgtgctgaaa
ggcgacattaaaatggccctgcgcctgaaagatggcggccgctatctggctgacttcaaaaccacgta
caaagccaagaaacctgtgcagatgcctggcgcgtacaatgtggaccgcaaactggacatcacctctc
ataatgaagattatacggtggtagagcaatatgagcgctccgagggtcgtcattctaccggtggcatg
gatgaactatacaaataagtttaaacccgctgatcagcctcgactgtgccttctagttgccagccatc
tgttgtttgcccctcccccgtgccttccttgaccctggaaggtgccactcccactgtcctttcctaat
aaaatgaggaaattgcatcgcattgtctgagtaggtgtcattctattctggggggtggggtggggcag
gacagcaagggggaggattgggaagacaatagcaggcatgctggggatgcggtgggctctatggcttc
tgaggcggaaagaaccagctggggctctagggggtatccccacgcgccctgtagcggcgcattaagcg
cggcgggtgtggtggttacgcgcagcgtgaccgctacacttgccagcgccctagcgcccgctcctttc
gctttcttcccttcctttctcgccacgttcgccggctttccccgtcaagctctaaatcgggggctccc
tttagggttccgatttagtgctttacggcacctcgaccccaaaaaacttgattagggtgatggttcac
gtagtgggccatcgccctgatagacggtttttcgccctttgacgttggagtccacgttctttaatagt
ggactcttgttccaaactggaacaacactcaaccctatctcggtctattcttttgatttataagggat
tttgccgatttcggcctattggttaaaaaatgagctgatttaacaaaaatttaacgcgaattaattct
gtggaatgtgtgtcagttagggtgtggaaagtccccaggctccccagcaggcagaagtatgcaaagca
tgcatctcaattagtcagcaaccaggtgtggaaagtccccaggctccccagcaggcagaagtatgcaa
agcatgcatctcaattagtcagcaaccatagtcccgcccctaactccgcccatcccgcccctaactcc
gcccagttccgcccattctccgccccatggctgactaattttttttatttatgcagaggccgaggccg
cctctgcctctgagctattccagaagtagtgaggaggcttttttggaggcctaggcttttgcaaaaag
ctcccgggagcttgtatatccattttcggatctgatcaagagacaggatgaggatcgtttcgcatgat
tgaacaagatggattgcacgcaggttctccggccgcttgggtggagaggctattcggctatgactggg
cacaacagacaatcggctgctctgatgccgccgtgttccggctgtcagcgcaggggcgcccggttctt
tttgtcaagaccgacctgtccggtgccctgaatgaactgcaggacgaggcagcgcggctatcgtggct
ggccacgacgggcgttccttgcgcagctgtgctcgacgttgtcactgaagcgggaagggactggctgc
tattgggcgaagtgccggggcaggatctcctgtcatctcaccttgctcctgccgagaaagtatccatc
atggctgatgcaatgcggcggctgcatacgcttgatccggctacctgcccattcgaccaccaagcgaa
acatcgcatcgagcgagcacgtactcggatggaagccggtcttgtcgatcaggatgatctggacgaag
agcatcaggggctcgcgccagccgaactgttcgccaggctcaaggcgcgcatgcccgacggcgaggat
ctcgtcgtgacccatggcgatgcctgcttgccgaatatcatggtggaaaatggccgcttttctggatt
catcgactgtggccggctgggtgtggcggaccgctatcaggacatagcgttggctacccgtgatattg
ctgaagagcttggcggcgaatgggctgaccgcttcctcgtgctttacggtatcgccgctcccgattcg
cagcgcatcgccttctatcgccttcttgacgagttcttctgagcgggactctggggttcgaaatgacc
gaccaagcgacgcccaacctgccatcacgagatttcgattccaccgccgccttctatgaaaggttggg
cttcggaatcgttttccgggacgccggctggatgatcctccagcgcggggatctcatgctggagttct
tcgcccaccccaacttgtttattgcagcttataatggttacaaataaagcaatagcatcacaaatttc
acaaataaagcatttttttcactgcattctagttgtggtttgtccaaactcatcaatgtatcttatca
tgtctgtataccgtcgacctctagctagagcttggcgtaatcatggtcatagctgtttcctgtgtgaa
attgttatccgctcacaattccacacaacatacgagccggaagcataaagtgtaaagcctggggtgcc
taatgagtgagctaactcacattaattgcgttgcgctcactgcccgctttccagtcgggaaacctgtc
gtgccagctgcattaatgaatcggccaacgcgcggggagaggcggtttgcgtattgggcgctcttccg
cttcctcgctcactgactcgctgcgctcggtcgttcggctgcggcgagcggtatcagctcactcaaag
gcggtaatacggttatccacagaatcaggggataacgcaggaaagaacatgtgagcaaaaggccagca
aaaggccaggaaccgtaaaaaggccgcgttgctggcgtttttccataggctccgcccccctgacgagc
atcacaaaaatcgacgctcaagtcagaggtggcgaaacccgacaggactataaagataccaggcgttt
ccccctggaagctccctcgtgcgctctcctgttccgaccctgccgcttaccggatacctgtccgcctt
tctcccttcgggaagcgtggcgctttctcatagctcacgctgtaggtatctcagttcggtgtaggtcg
ttcgctccaagctgggctgtgtgcacgaaccccccgttcagcccgaccgctgcgccttatccggtaac
tatcgtcttgagtccaacccggtaagacacgacttatcgccactggcagcagccactggtaacaggat
tagcagagcgaggtatgtaggcggtgctacagagttcttgaagtggtggcctaactacggctacacta
gaagaacagtatttggtatctgcgctctgctgaagccagttaccttcggaaaaagagttggtagctct
tgatccggcaaacaaaccaccgctggtagcggtttttttgtttgcaagcagcagattacgcgcagaaa
aaaaggatctcaagaagatcctttgatcttttctacggggtctgacgctcagtggaacgaaaactcac
gttaagggattttggtcatgagattatcaaaaaggatcttcacctagatccttttaaattaaaaatga
agttttaaatcaatctaaagtatatatgagtaaacttggtctgacagttaccaatgcttaatcagtga
ggcacctatctcagcgatctgtctatttcgttcatccatagttgcctgactccccgtcgtgtagataa
ctacgatacgggagggcttaccatctggccccagtgctgcaatgataccgcgagacccacgctcaccg
gctccagatttatcagcaataaaccagccagccggaagggccgagcgcagaagtggtcctgcaacttt
atccgcctccatccagtctattaattgttgccgggaagctagagtaagtagttcgccagttaatagtt
tgcgcaacgttgttgccattgctacaggcatcgtggtgtcacgctcgtcgtttggtatggcttcattc
agctccggttcccaacgatcaaggcgagttacatgatcccccatgttgtgcaaaaaagcggttagctc
cttcggtcctccgatcgttgtcagaagtaagttggccgcagtgttatcactcatggttatggcagcac
tgcataattctcttactgtcatgccatccgtaagatgcttttctgtgactggtgagtactcaaccaag
tcattctgagaatagtgtatgcggcgaccgagttgctcttgcccggcgtcaatacgggataataccgc
gccacatagcagaactttaaaagtgctcatcattggaaaacgttcttcggggcgaaaactctcaagga
tcttaccgctgttgagatccagttcgatgtaacccactcgtgcacccaactgatcttcagcatctttt
actttcaccagcgtttctgggtgagcaaaaacaggaaggcaaaatgccgcaaaaaagggaataagggc
gacacggaaatgttgaatactcatactcttcctttttcaatattattgaagcatttatcagggttatt
gtctcatgagcggatacatatttgaatgtatttagaaaaataaacaaataggggttccgcgcacattt
ccccgaaaagtgccacctgacgtc
pMD140-pcDNA3.1-SARS2_mut_v3-GGSG-foldon-G-6xHis-BirA-T2A-mScarlet
SEQ ID NO: 117
gacggatcgggagatctcccgatcccctatggtgcactctcagtacaatctgctctgatgccgcatag
ttaagccagtatctgctccctgcttgtgtgttggaggtcgctgagtagtgcgcgagcaaaatttaagc
tacaacaaggcaaggcttgaccgacaattgcatgaagaatctgcttagggttaggcgttttgcgctgc
ttcgcgatgtacgggccagatatacgcgttgacattgattattgactagttattaatagtaatcaatt
acggggtcattagttcatagcccatatatggagttccgcgttacataacttacggtaaatggcccgcc
tggctgaccgcccaacgacccccgcccattgacgtcaataatgacgtatgttcccatagtaacgccaa
tagggactttccattgacgtcaatgggtggagtatttacggtaaactgcccacttggcagtacatcaa
gtgtatcatatgccaagtacgccccctattgacgtcaatgacggtaaatggcccgcctggcattatgc
ccagtacatgaccttatgggactttcctacttggcagtacatctacgtattagtcatcgctattacca
tggtgatgcggttttggcagtacatcaatgggcgtggatagcggtttgactcacggggatttccaagt
ctccaccccattgacgtcaatgggagtttgttttggcaccaaaatcaacgggactttccaaaatgtcg
taacaactccgccccattgacgcaaatgggcggtaggcgtgtacggtgggaggtctatataagcagag
ctctctggctaactagagaacccactgcttactggcttatcgaaattaatacgactcactatagggag
acccaagctggATGTTTGTGTTCCTGGTGCTGCTGCCACTGGTGTCCAGCCAGTGTGTGAACCTGACC
ACCAGGACCCAACTTCCTCCTGCCTACACCAACTCCTTCACCAGGGGAGTCTACTACCCTGACAAGGT
GTTCAGGTCCTCTGTGCTGCACAGCACCCAGGACCTGTTCCTGCCATTCTTCAGCAATGTGACCTGGT
TCCATGCCATCCATGTGTCTGGCACCAATGGCACCAAGAGGTTTGACAACCCTGTGCTGCCATTCAAT
GATGGAGTCTACTTTGCCAGCACAGAGAAGAGCAACATCATCAGGGGCTGGATTTTTGGCACCACCCT
GGACAGCAAGACCCAGTCCCTGCTGATTGTGAACAATGCCACCAATGTGGTGATTAAGGTGTGTGAGT
TCCAGTTCTGTAATGACCCATTCCTGGGAGTCTACTACCACAAGAACAACAAGTCCTGGATGGAGTCT
GAGTTCAGGGTCTACTCCTCTGCCAACAACTGTACCTTTGAATATGTGAGCCAACCATTCCTGATGGA
CTTGGAGGGCAAGCAGGGCAACTTCAAGAACCTGAGGGAGTTTGTGTTCAAGAACATTGATGGCTACT
TCAAGATTTACAGCAAACACACACCAATCAACCTGGTGAGGGACCTGCCACAGGGCTTCTCTGCCTTG
GAACCACTGGTGGACCTGCCAATTGGCATCAACATCACCAGGTTCCAGACCCTGCTGGCTCTGCACAG
GTCCTACCTGACACCTGGAGACTCCTCCTCTGGCTGGACAGCAGGAGCAGCAGCCTACTATGTGGGCT
ACCTCCAACCAAGGACCTTCCTGCTGAAATACAATGAGAATGGCACCATCACAGATGCTGAGGGCAAG
CAGGGCAACTTCAAGAACCTGAGGGAGTTTGTGTTCAAGAACATTGATGGCTACTTCAAGATTTACAG
CAAACACACACCAATCAACCTGGTGAGGGACCTGCCACAGGGCTTCTCTGCCTTGGAACCACTGGTGG
ACCTGCCAATTGGCATCAACATCACCAGGTTCCAGACCCTGCTGGCTCTGCACAGGTCCTACCTGACA
CCTGGAGACTCCTCCTCTGGCTGGACAGCAGGAGCAGCAGCCTACTATGTGGGCTACCTCCAACCAAG
GACCTTCCTGCTGAAATACAATGAGAATGGCACCATCACAGATGCTGTGGACTGTGCCCTGGACCCAC
TGTCTGAGACCAAGTGTACCCTGAAATCCTTCACAGTGGAGAAGGGCATCTACCAGACCAGCAACTTC
AGGGTCCAACCAACAGAGAGCATTGTGAGGTTTCCAAACATCACCAACCTGTGTCCATTTGGAGAGGT
GTTCAATGCCACCAGGTTTGCCTCTGTCTATGCCTGGAACAGGAAGAGGATTAGCAACTGTGTGGCTG
ACTACTCTGTGCTCTACAACTCTGCCTCCTTCAGCACCTTCAAGTGTTATGGAGTGAGCCCAACCAAA
CTGAATGACCTGTGTTTCACCAATGTCTATGCTGACTCCTTTGTGATTAGGGGAGATGAGGTGAGACA
GATTGCCCCTGGACAAACAGGCAAGATTGCTGACTACAACTACAAACTGCCTGATGACTTCACAGGCT
GTGTGATTGCCTGGAACAGCAACAACCTGGACAGCAAGGTGGGAGGCAACTACAACTACCTCTACAGA
CTGTTCAGGAAGAGCAACCTGAAACCATTTGAGAGGGACATCAGCACAGAGATTTACgctGCTGGCAG
CACACCATGTAATGGAGTGGAGGGCgccgctTGTTACTTTCCACTCCAATCCTATGGCTTCCAACCAA
CCAATGGAGTGGGCTACCAACCATACAGGGTGGTGGTGCTGTCCTTTGAACTGCTCCATGCCCCTGCC
ACAGTGTGTGGACCAAAGAAGAGCACCAACCTGGTGAAGAACAAGTGTGTGAACTTCAACTTCAATGG
ACTGACAGGCACAGGAGTGCTGACAGAGAGCAACAAGAAGTTCCTGCCATTCCAACAGTTTGGCAGGG
ACATTGCTGACACCACAGATGCTGTGAGGGACCCACAGACCTTGGAGATTCTGGACATCACACCATGT
TCCTTTGGAGGAGTGTCTGTGATTACACCTGGCACCAACACCAGCAACCAGGTGGCTGTGCTCTACCA
GGATGTGAACTGTACTGAGGTGCCTGTGGCTATCCATGCTGACCAACTTACACCAACCTGGAGGGTCT
ACAGCACAGGCAGCAATGTGTTCCAGACCAGGGCTGGCTGTCTGATTGGAGCAGAGCATGTGAACAAC
TCCTATGAGTGTGACATCCCAATTGGAGCAGGCATCTGTGCCTCCTACCAGACCCAGACCAACAGCCC
AAGGAGGGCAAGGTCTGTGGCAAGCCAGAGCATCATTGCCTACACAATGAGTCTGGGAGCAGAGAACT
CTGTGGCTTACAGCAACAACAGCATTGCCATCCCAACCAACTTCACCATCTCTGTGACCACAGAGATT
CTGCCTGTGAGTATGACCAAGACCTCTGTGGACTGTACAATGTATATCTGTGGAGACAGCACAGAGTG
TAGCAACCTGCTGCTCCAATATGGCTCCTTCTGTACCCAACTTAACAGGGCTCTGACAGGCATTGCTG
TGGAACAGGACAAGAACACCCAGGAGGTGTTTGCCCAGGTGAAGCAGATTTACAAGACACCTCCAATC
AAGGACTTTGGAGGCTTCAACTTCAGCCAGATTCTGCCTGACCCAAGCAAGCCAAGCAAGAGGTCCTT
CATTGAGGACCTGCTGTTCAACAAGGTGACCCTGGCTGATGCTGGCTTCATCAAGCAATATGGAGACT
GTCTGGGAGACATTGCTGCCAGGGACCTGATTTGTGCCCAGAAGTTCAATGGACTGACAGTGCTGCCT
CCACTGCTGACAGATGAGATGATTGCCCAATACACCTCTGCCCTGCTGGCTGGCACCATCACCTCTGG
CTGGACCTTTGGAGCAGGAGCAGCCCTCCAAATCCCATTTGCTATGCAGATGGCTTACAGGTTCAATG
GCATTGGAGTGACCCAGAATGTGCTCTATGAGAACCAGAAACTGATTGCCAACCAGTTCAACTCTGCC
ATTGGCAAGATTCAGGACTCCCTGTCCAGCACAGCCTCTGCCCTGGGCAAACTCCAAGATGTGGTGAA
CCAGAATGCCCAGGCTCTGAACACCCTGGTGAAGCAACTTTCCAGCAACTTTGGAGCCATCTCCTCTG
TGCTGAATGACATCCTGAGCAGACTGGACcctcccGAGGCTGAGGTCCAGATTGACAGACTGATTACA
GGCAGACTCCAATCCCTCCAAACCTATGTGACCCAACAACTTATCAGGGCTGCTGAGATTAGGGCATC
TGCCAACCTGGCTGCCACCAAGATGAGTGAGTGTGTGCTGGGACAAAGCAAGAGGGTGGACTTCTGTG
GCAAGGGCTACCACCTGATGAGTTTTCCACAGTCTGCCCCTCATGGAGTGGTGTTCCTGCATGTGACC
TATGTGCCTGCCCAGGAGAAGAACTTCACCACAGCCCCTGCCATCTGCCATGATGGCAAGGCTCACTT
TCCAAGGGAGGGAGTGTTTGTGAGCAATGGCACCCACTGGTTTGTGACCCAGAGGAACTTCTATGAAC
CACAGATTATCACCACAGACAACACCTTTGTGTCTGGCAACTGTGATGTGGTGATTGGCATTGTGAAC
AACACAGTCTATGACCCACTCCAACCTGAACTGGACTCCTTCAAGGAGGAACTGGACAAATACTTCAA
GAACCACACCAGCCCTGATGTGGACCTGGGAGACATCTCTGGCATCAATGCCTCTGTGGTGAACATCC
AGAAGGAGATTGACAGACTGAATGAGGTGGCTAAGAACCTGAATGAGTCCCTGATTGACCTCCAAGAA
CTGGGCAAAggcggaggcagcgggTATATTCCGGAGGCTCCAAGAGACGGTCAGGCGTACGTACGGAA
GGACGGCGAATGGGTTCTCTTGAGCACTTTCTTAggcCATCATCATCACCACCATATGAAGGACAACA
CAGTCCCGCTGAAACTTATTGCGCTTCTCGCAAATGGAGAGTTCCACTCTGGAGAGCAACTCGGCGAG
ACCCTGGGAATGAGTCGGGCGGCTATCAACAAGCATATACAGACTTTGAGGGATTGGGGTGTGGATGT
CTTCACTGTTCCGGGTAAGGGCTATTCACTGCCCGAACCGATCCAACTTCTCAATGCCAAACAGATAT
TGGGGCAACTTGATGGTGGCTCTGTCGCCGTGTTGCCGGTCATCGATAGCACGAACCAATATCTCTTG
GACCGCATCGGAGAACTCAAGAGCGGAGACGCATGTATAGCGGAATATCAGCAAGCCGGTAGAGGAAG
AAGGGGACGGAAATGGTTCTCTCCATTCGGAGCCAACCTGTATTTGAGCATGTTCTGGCGATTGGAGC
AGGGACCAGCCGCCGCCATCGGTCTCTCTCTTGTCATAGGTATTGTCATGGCGGAAGTCCTCCGCAAA
CTCGGGGCCGACAAAGTACGCGTGAAATGGCCGAACGACCTCTATCTTCAGGATAGGAAATTGGCAGG
GATATTGGTTGAACTGACGGGTAAGACGGGGGACGCCGCTCAGATTGTTATAGGTGCCGGAATAAACA
TGGCCATGCGCAGAGTTGAAGAGTCAGTGGTAAACCAGGGTTGGATCACTCTCCAAGAGGCGGGAATA
AACCTGGATCGCAACACACTGGCTGCCATGCTTATACGGGAACTCCGAGCTGCATTGGAACTGTTCGA
GCAAGAAGGGCTTGCTCCGTACTTGAGCAGGTGGGAAAAGCTGGATAATTTCATAAATCGCCCTGTTA
AACTCATCATCGGAGATAAAGAGATTTTTGGCATAAGTCGAGGAATCGATAAACAAGGTGCATTGCTG
CTTGAGCAAGACGGTATAATCAAACCTTGGATGGGTGGCGAAATCTCACTTAGAAGCGCGGAAAAATA
TGAACAAggcagtggagagggcagaggaagtctgctaacatgcggtgacgtcgaggagaatcctggcc
caatgagtaaaggagaagctgtgattaaagagttcatgcgcttcaaagttcacatggagggttctatg
aacggtcacgagttcgagatcgaaggcgaaggcgagggccgtccgtatgaaggcacccagaccgccaa
actgaaagtgactaaaggcggcccgctgcctttttcctgggacatcctgagcccgcaatttatgtacg
gttctagggcgttcaccaaacacccagcggatatcccggactattataagcagtcttttccggaaggt
ttcaagtgggaacgcgtaatgaattttgaagatggtggtgccgtgaccgtcactcaggacacctccct
ggaggatggcaccctgatctataaagttaaactgcgtggtactaattttccacctgatggcccggtga
tgcagaaaaagacgatgggttgggaggcgtctaccgaacgcttgtatccggaagatggtgtgctgaaa
ggcgacattaaaatggccctgcgcctgaaagatggcggccgctatctggctgacttcaaaaccacgta
caaagccaagaaacctgtgcagatgcctggcgcgtacaatgtggaccgcaaactggacatcacctctc
ataatgaagattatacggtggtagagcaatatgagcgctccgagggtcgtcattctaccggtggcatg
gatgaactatacaaataagtttaaacccgctgatcagcctcgactgtgccttctagttgccagccatc
tgttgtttgcccctcccccgtgccttccttgaccctggaaggtgccactcccactgtcctttcctaat
aaaatgaggaaattgcatcgcattgtctgagtaggtgtcattctattctggggggtggggtggggcag
gacagcaagggggaggattgggaagacaatagcaggcatgctggggatgcggtgggctctatggcttc
tgaggcggaaagaaccagctggggctctagggggtatccccacgcgccctgtagcggcgcattaagcg
cggcgggtgtggtggttacgcgcagcgtgaccgctacacttgccagcgccctagcgcccgctcctttc
gctttcttcccttcctttctcgccacgttcgccggctttccccgtcaagctctaaatcgggggctccc
tttagggttccgatttagtgctttacggcacctcgaccccaaaaaacttgattagggtgatggttcac
gtagtgggccatcgccctgatagacggtttttcgccctttgacgttggagtccacgttctttaatagt
ggactcttgttccaaactggaacaacactcaaccctatctcggtctattcttttgatttataagggat
tttgccgatttcggcctattggttaaaaaatgagctgatttaacaaaaatttaacgcgaattaattct
gtggaatgtgtgtcagttagggtgtggaaagtccccaggctccccagcaggcagaagtatgcaaagca
tgcatctcaattagtcagcaaccaggtgtggaaagtccccaggctccccagcaggcagaagtatgcaa
agcatgcatctcaattagtcagcaaccatagtcccgcccctaactccgcccatcccgcccctaactcc
gcccagttccgcccattctccgccccatggctgactaattttttttatttatgcagaggccgaggccg
cctctgcctctgagctattccagaagtagtgaggaggcttttttggaggcctaggcttttgcaaaaag
ctcccgggagcttgtatatccattttcggatctgatcaagagacaggatgaggatcgtttcgcatgat
tgaacaagatggattgcacgcaggttctccggccgcttgggtggagaggctattcggctatgactggg
cacaacagacaatcggctgctctgatgccgccgtgttccggctgtcagcgcaggggcgcccggttctt
tttgtcaagaccgacctgtccggtgccctgaatgaactgcaggacgaggcagcgcggctatcgtggct
ggccacgacgggcgttccttgcgcagctgtgctcgacgttgtcactgaagcgggaagggactggctgc
tattgggcgaagtgccggggcaggatctcctgtcatctcaccttgctcctgccgagaaagtatccatc
atggctgatgcaatgcggcggctgcatacgcttgatccggctacctgcccattcgaccaccaagcgaa
acatcgcatcgagcgagcacgtactcggatggaagccggtcttgtcgatcaggatgatctggacgaag
agcatcaggggctcgcgccagccgaactgttcgccaggctcaaggcgcgcatgcccgacggcgaggat
ctcgtcgtgacccatggcgatgcctgcttgccgaatatcatggtggaaaatggccgcttttctggatt
catcgactgtggccggctgggtgtggcggaccgctatcaggacatagcgttggctacccgtgatattg
ctgaagagcttggcggcgaatgggctgaccgcttcctcgtgctttacggtatcgccgctcccgattcg
cagcgcatcgccttctatcgccttcttgacgagttcttctgagcgggactctggggttcgaaatgacc
gaccaagcgacgcccaacctgccatcacgagatttcgattccaccgccgccttctatgaaaggttggg
cttcggaatcgttttccgggacgccggctggatgatcctccagcgcggggatctcatgctggagttct
tcgcccaccccaacttgtttattgcagcttataatggttacaaataaagcaatagcatcacaaatttc
acaaataaagcatttttttcactgcattctagttgtggtttgtccaaactcatcaatgtatcttatca
tgtctgtataccgtcgacctctagctagagcttggcgtaatcatggtcatagctgtttcctgtgtgaa
attgttatccgctcacaattccacacaacatacgagccggaagcataaagtgtaaagcctggggtgcc
taatgagtgagctaactcacattaattgcgttgcgctcactgcccgctttccagtcgggaaacctgtc
gtgccagctgcattaatgaatcggccaacgcgcggggagaggcggtttgcgtattgggcgctcttccg
cttcctcgctcactgactcgctgcgctcggtcgttcggctgcggcgagcggtatcagctcactcaaag
gcggtaatacggttatccacagaatcaggggataacgcaggaaagaacatgtgagcaaaaggccagca
aaaggccaggaaccgtaaaaaggccgcgttgctggcgtttttccataggctccgcccccctgacgagc
atcacaaaaatcgacgctcaagtcagaggtggcgaaacccgacaggactataaagataccaggcgttt
ccccctggaagctccctcgtgcgctctcctgttccgaccctgccgcttaccggatacctgtccgcctt
tctcccttcgggaagcgtggcgctttctcatagctcacgctgtaggtatctcagttcggtgtaggtcg
ttcgctccaagctgggctgtgtgcacgaaccccccgttcagcccgaccgctgcgccttatccggtaac
tatcgtcttgagtccaacccggtaagacacgacttatcgccactggcagcagccactggtaacaggat
tagcagagcgaggtatgtaggcggtgctacagagttcttgaagtggtggcctaactacggctacacta
gaagaacagtatttggtatctgcgctctgctgaagccagttaccttcggaaaaagagttggtagctct
tgatccggcaaacaaaccaccgctggtagcggtttttttgtttgcaagcagcagattacgcgcagaaa
aaaaggatctcaagaagatcctttgatcttttctacggggtctgacgctcagtggaacgaaaactcac
gttaagggattttggtcatgagattatcaaaaaggatcttcacctagatccttttaaattaaaaatga
agttttaaatcaatctaaagtatatatgagtaaacttggtctgacagttaccaatgcttaatcagtga
ggcacctatctcagcgatctgtctatttcgttcatccatagttgcctgactccccgtcgtgtagataa
ctacgatacgggagggcttaccatctggccccagtgctgcaatgataccgcgagacccacgctcaccg
gctccagatttatcagcaataaaccagccagccggaagggccgagcgcagaagtggtcctgcaacttt
atccgcctccatccagtctattaattgttgccgggaagctagagtaagtagttcgccagttaatagtt
tgcgcaacgttgttgccattgctacaggcatcgtggtgtcacgctcgtcgtttggtatggcttcattc
agctccggttcccaacgatcaaggcgagttacatgatcccccatgttgtgcaaaaaagcggttagctc
cttcggtcctccgatcgttgtcagaagtaagttggccgcagtgttatcactcatggttatggcagcac
tgcataattctcttactgtcatgccatccgtaagatgcttttctgtgactggtgagtactcaaccaag
tcattctgagaatagtgtatgcggcgaccgagttgctcttgcccggcgtcaatacgggataataccgc
gccacatagcagaactttaaaagtgctcatcattggaaaacgttcttcggggcgaaaactctcaagga
tcttaccgctgttgagatccagttcgatgtaacccactcgtgcacccaactgatcttcagcatctttt
actttcaccagcgtttctgggtgagcaaaaacaggaaggcaaaatgccgcaaaaaagggaataagggc
gacacggaaatgttgaatactcatactcttcctttttcaatattattgaagcatttatcagggttatt
gtctcatgagcggatacatatttgaatgtatttagaaaaataaacaaataggggttccgcgcacattt
ccccgaaaagtgccacctgacgtc
pMD141-pcDNA3.1-SARS2_mut_v4-GGSG-foldon-G-6xHis-BirA-T2A-mScarlet
SEQ ID NO: 118
gacggatcgggagatctcccgatcccctatggtgcactctcagtacaatctgctctgatgccgcatag
ttaagccagtatctgctccctgcttgtgtgttggaggtcgctgagtagtgcgcgagcaaaatttaagc
tacaacaaggcaaggcttgaccgacaattgcatgaagaatctgcttagggttaggcgttttgcgctgc
ttcgcgatgtacgggccagatatacgcgttgacattgattattgactagttattaatagtaatcaatt
acggggtcattagttcatagcccatatatggagttccgcgttacataacttacggtaaatggcccgcc
tggctgaccgcccaacgacccccgcccattgacgtcaataatgacgtatgttcccatagtaacgccaa
tagggactttccattgacgtcaatgggtggagtatttacggtaaactgcccacttggcagtacatcaa
gtgtatcatatgccaagtacgccccctattgacgtcaatgacggtaaatggcccgcctggcattatgc
ccagtacatgaccttatgggactttcctacttggcagtacatctacgtattagtcatcgctattacca
tggtgatgcggttttggcagtacatcaatgggcgtggatagcggtttgactcacggggatttccaagt
ctccaccccattgacgtcaatgggagtttgttttggcaccaaaatcaacgggactttccaaaatgtcg
taacaactccgccccattgacgcaaatgggcggtaggcgtgtacggtgggaggtctatataagcagag
ctctctggctaactagagaacccactgcttactggcttatcgaaattaatacgactcactatagggag
acccaagctggATGTTTGTGTTCCTGGTGCTGCTGCCACTGGTGTCCAGCCAGTGTGTGAACCTGACC
ACCAGGACCCAACTTCCTCCTGCCTACACCAACTCCTTCACCAGGGGAGTCTACTACCCTGACAAGGT
GTTCAGGTCCTCTGTGCTGCACAGCACCCAGGACCTGTTCCTGCCATTCTTCAGCAATGTGACCTGGT
TCCATGCCATCCATGTGTCTGGCACCAATGGCACCAAGAGGTTTGACAACCCTGTGCTGCCATTCAAT
GATGGAGTCTACTTTGCCAGCACAGAGAAGAGCAACATCATCAGGGGCTGGATTTTTGGCACCACCCT
GGACAGCAAGACCCAGTCCCTGCTGATTGTGAACAATGCCACCAATGTGGTGATTAAGGTGTGTGAGT
TCCAGTTCTGTAATGACCCATTCCTGGGAGTCTACTACCACAAGAACAACAAGTCCTGGATGGAGTCT
GAGTTCAGGGTCTACTCCTCTGCCAACAACTGTACCTTTGAATATGTGAGCCAACCATTCCTGATGGA
CTTGGAGGGCAAGCAGGGCAACTTCAAGAACCTGAGGGAGTTTGTGTTCAAGAACATTGATGGCTACT
TCAAGATTTACAGCAAACACACACCAATCAACCTGGTGAGGGACCTGCCACAGGGCTTCTCTGCCTTG
GAACCACTGGTGGACCTGCCAATTGGCATCAACATCACCAGGTTCCAGACCCTGCTGGCTCTGCACAG
GTCCTACCTGACACCTGGAGACTCCTCCTCTGGCTGGACAGCAGGAGCAGCAGCCTACTATGTGGGCT
ACCTCCAACCAAGGACCTTCCTGCTGAAATACAATGAGAATGGCACCATCACAGATGCTGAGGGCAAG
CAGGGCAACTTCAAGAACCTGAGGGAGTTTGTGTTCAAGAACATTGATGGCTACTTCAAGATTTACAG
CAAACACACACCAATCAACCTGGTGAGGGACCTGCCACAGGGCTTCTCTGCCTTGGAACCACTGGTGG
ACCTGCCAATTGGCATCAACATCACCAGGTTCCAGACCCTGCTGGCTCTGCACAGGTCCTACCTGACA
CCTGGAGACTCCTCCTCTGGCTGGACAGCAGGAGCAGCAGCCTACTATGTGGGCTACCTCCAACCAAG
GACCTTCCTGCTGAAATACAATGAGAATGGCACCATCACAGATGCTGTGGACTGTGCCCTGGACCCAC
TGTCTGAGACCAAGTGTACCCTGAAATCCTTCACAGTGGAGAAGGGCATCTACCAGACCAGCAACTTC
AGGGTCCAACCAACAGAGAGCATTGTGAGGTTTCCAAACATCACCAACCTGTGTCCATTTGGAGAGGT
GTTCAATGCCACCAGGTTTGCCTCTGTCTATGCCTGGAACAGGAAGAGGATTAGCAACTGTGTGGCTG
ACTACTCTGTGCTCTACAACTCTGCCTCCTTCAGCACCTTCAAGTGTTATGGAGTGAGCCCAACCAAA
CTGAATGACCTGTGTTTCACCAATGTCTATGCTGACTCCTTTGTGATTAGGGGAGATGAGGTGAGACA
GATTGCCCCTGGACAAACAGGCgccATTGCTGACTACAACTACAAACTGCCTGATGACTTCACAGGCT
GTGTGATTGCCTGGAACAGCgccAACCTGGACAGCAAGGTGGGAGGCAACgccAACTACCTCTACAGA
gccgctAGGAAGAGCAACCTGAAACCATTTGAGAGGGACATCAGCACAGAGATTgccgctGCTGGCAG
CACACCATGTAATGGAGTGGAGGGCgccgctTGTTACTTTCCACTCgccTCCTATGGCTTCgccCCAg
ctgccGGAGTGGGCTACCAACCATACAGGGTGGTGGTGCTGTCCTTTGAACTGCTCCATGCCCCTGCC
ACAGTGTGTGGACCAAAGAAGAGCACCAACCTGGTGAAGAACAAGTGTGTGAACTTCAACgccAATGG
ACTGACAGGCACAGGAGTGCTGACAGAGAGCAACAAGAAGTTCCTGCCATTCCAACAGTTTGGCAGGG
ACATTGCTGACACCACAGATGCTGTGAGGGACCCACAGACCTTGGAGATTCTGGACATCACACCATGT
TCCTTTGGAGGAGTGTCTGTGATTACACCTGGCACCAACACCAGCAACCAGGTGGCTGTGCTCTACCA
GGATGTGAACTGTACTGAGGTGCCTGTGGCTATCCATGCTGACCAACTTACACCAACCTGGAGGGTCT
ACAGCACAGGCAGCAATGTGTTCCAGACCAGGGCTGGCTGTCTGATTGGAGCAGAGCATGTGAACAAC
TCCTATGAGTGTGACATCCCAATTGGAGCAGGCATCTGTGCCTCCTACCAGACCCAGACCAACAGCCC
AAGGAGGGCAAGGTCTGTGGCAAGCCAGAGCATCATTGCCTACACAATGAGTCTGGGAGCAGAGAACT
CTGTGGCTTACAGCAACAACAGCATTGCCATCCCAACCAACTTCACCATCTCTGTGACCACAGAGATT
CTGCCTGTGAGTATGACCAAGACCTCTGTGGACTGTACAATGTATATCTGTGGAGACAGCACAGAGTG
TAGCAACCTGCTGCTCCAATATGGCTCCTTCTGTACCCAACTTAACAGGGCTCTGACAGGCATTGCTG
TGGAACAGGACAAGAACACCCAGGAGGTGTTTGCCCAGGTGAAGCAGATTTACAAGACACCTCCAATC
AAGGACTTTGGAGGCTTCAACTTCAGCCAGATTCTGCCTGACCCAAGCAAGCCAAGCAAGAGGTCCTT
CATTGAGGACCTGCTGTTCAACAAGGTGACCCTGGCTGATGCTGGCTTCATCAAGCAATATGGAGACT
GTCTGGGAGACATTGCTGCCAGGGACCTGATTTGTGCCCAGAAGTTCAATGGACTGACAGTGCTGCCT
CCACTGCTGACAGATGAGATGATTGCCCAATACACCTCTGCCCTGCTGGCTGGCACCATCACCTCTGG
CTGGACCTTTGGAGCAGGAGCAGCCCTCCAAATCCCATTTGCTATGCAGATGGCTTACAGGTTCAATG
GCATTGGAGTGACCCAGAATGTGCTCTATGAGAACCAGAAACTGATTGCCAACCAGTTCAACTCTGCC
ATTGGCAAGATTCAGGACTCCCTGTCCAGCACAGCCTCTGCCCTGGGCAAACTCCAAGATGTGGTGAA
CCAGAATGCCCAGGCTCTGAACACCCTGGTGAAGCAACTTTCCAGCAACTTTGGAGCCATCTCCTCTG
TGCTGAATGACATCCTGAGCAGACTGGACcctcccGAGGCTGAGGTCCAGATTGACAGACTGATTACA
GGCAGACTCCAATCCCTCCAAACCTATGTGACCCAACAACTTATCAGGGCTGCTGAGATTAGGGCATC
TGCCAACCTGGCTGCCACCAAGATGAGTGAGTGTGTGCTGGGACAAAGCAAGAGGGTGGACTTCTGTG
GCAAGGGCTACCACCTGATGAGTTTTCCACAGTCTGCCCCTCATGGAGTGGTGTTCCTGCATGTGACC
TATGTGCCTGCCCAGGAGAAGAACTTCACCACAGCCCCTGCCATCTGCCATGATGGCAAGGCTCACTT
TCCAAGGGAGGGAGTGTTTGTGAGCAATGGCACCCACTGGTTTGTGACCCAGAGGAACTTCTATGAAC
CACAGATTATCACCACAGACAACACCTTTGTGTCTGGCAACTGTGATGTGGTGATTGGCATTGTGAAC
AACACAGTCTATGACCCACTCCAACCTGAACTGGACTCCTTCAAGGAGGAACTGGACAAATACTTCAA
GAACCACACCAGCCCTGATGTGGACCTGGGAGACATCTCTGGCATCAATGCCTCTGTGGTGAACATCC
AGAAGGAGATTGACAGACTGAATGAGGTGGCTAAGAACCTGAATGAGTCCCTGATTGACCTCCAAGAA
CTGGGCAAAggcggaggcagcgggTATATTCCGGAGGCTCCAAGAGACGGTCAGGCGTACGTACGGAA
GGACGGCGAATGGGTTCTCTTGAGCACTTTCTTAggcCATCATCATCACCACCATATGAAGGACAACA
CAGTCCCGCTGAAACTTATTGCGCTTCTCGCAAATGGAGAGTTCCACTCTGGAGAGCAACTCGGCGAG
ACCCTGGGAATGAGTCGGGCGGCTATCAACAAGCATATACAGACTTTGAGGGATTGGGGTGTGGATGT
CTTCACTGTTCCGGGTAAGGGCTATTCACTGCCCGAACCGATCCAACTTCTCAATGCCAAACAGATAT
TGGGGCAACTTGATGGTGGCTCTGTCGCCGTGTTGCCGGTCATCGATAGCACGAACCAATATCTCTTG
GACCGCATCGGAGAACTCAAGAGCGGAGACGCATGTATAGCGGAATATCAGCAAGCCGGTAGAGGAAG
AAGGGGACGGAAATGGTTCTCTCCATTCGGAGCCAACCTGTATTTGAGCATGTTCTGGCGATTGGAGC
AGGGACCAGCCGCCGCCATCGGTCTCTCTCTTGTCATAGGTATTGTCATGGCGGAAGTCCTCCGCAAA
CTCGGGGCCGACAAAGTACGCGTGAAATGGCCGAACGACCTCTATCTTCAGGATAGGAAATTGGCAGG
GATATTGGTTGAACTGACGGGTAAGACGGGGGACGCCGCTCAGATTGTTATAGGTGCCGGAATAAACA
TGGCCATGCGCAGAGTTGAAGAGTCAGTGGTAAACCAGGGTTGGATCACTCTCCAAGAGGCGGGAATA
AACCTGGATCGCAACACACTGGCTGCCATGCTTATACGGGAACTCCGAGCTGCATTGGAACTGTTCGA
GCAAGAAGGGCTTGCTCCGTACTTGAGCAGGTGGGAAAAGCTGGATAATTTCATAAATCGCCCTGTTA
AACTCATCATCGGAGATAAAGAGATTTTTGGCATAAGTCGAGGAATCGATAAACAAGGTGCATTGCTG
CTTGAGCAAGACGGTATAATCAAACCTTGGATGGGTGGCGAAATCTCACTTAGAAGCGCGGAAAAATA
TGAACAAggcagtggagagggcagaggaagtctgctaacatgcggtgacgtcgaggagaatcctggcc
caatgagtaaaggagaagctgtgattaaagagttcatgcgcttcaaagttcacatggagggttctatg
aacggtcacgagttcgagatcgaaggcgaaggcgagggccgtccgtatgaaggcacccagaccgccaa
actgaaagtgactaaaggcggcccgctgcctttttcctgggacatcctgagcccgcaatttatgtacg
gttctagggcgttcaccaaacacccagcggatatcccggactattataagcagtcttttccggaaggt
ttcaagtgggaacgcgtaatgaattttgaagatggtggtgccgtgaccgtcactcaggacacctccct
ggaggatggcaccctgatctataaagttaaactgcgtggtactaattttccacctgatggcccggtga
tgcagaaaaagacgatgggttgggaggcgtctaccgaacgcttgtatccggaagatggtgtgctgaaa
ggcgacattaaaatggccctgcgcctgaaagatggcggccgctatctggctgacttcaaaaccacgta
caaagccaagaaacctgtgcagatgcctggcgcgtacaatgtggaccgcaaactggacatcacctctc
ataatgaagattatacggtggtagagcaatatgagcgctccgagggtcgtcattctaccggtggcatg
gatgaactatacaaataagtttaaacccgctgatcagcctcgactgtgccttctagttgccagccatc
tgttgtttgcccctcccccgtgccttccttgaccctggaaggtgccactcccactgtcctttcctaat
aaaatgaggaaattgcatcgcattgtctgagtaggtgtcattctattctggggggtggggtggggcag
gacagcaagggggaggattgggaagacaatagcaggcatgctggggatgcggtgggctctatggcttc
tgaggcggaaagaaccagctggggctctagggggtatccccacgcgccctgtagcggcgcattaagcg
cggcgggtgtggtggttacgcgcagcgtgaccgctacacttgccagcgccctagcgcccgctcctttc
gctttcttcccttcctttctcgccacgttcgccggctttccccgtcaagctctaaatcgggggctccc
tttagggttccgatttagtgctttacggcacctcgaccccaaaaaacttgattagggtgatggttcac
gtagtgggccatcgccctgatagacggtttttcgccctttgacgttggagtccacgttctttaatagt
ggactcttgttccaaactggaacaacactcaaccctatctcggtctattcttttgatttataagggat
tttgccgatttcggcctattggttaaaaaatgagctgatttaacaaaaatttaacgcgaattaattct
gtggaatgtgtgtcagttagggtgtggaaagtccccaggctccccagcaggcagaagtatgcaaagca
tgcatctcaattagtcagcaaccaggtgtggaaagtccccaggctccccagcaggcagaagtatgcaa
agcatgcatctcaattagtcagcaaccatagtcccgcccctaactccgcccatcccgcccctaactcc
gcccagttccgcccattctccgccccatggctgactaattttttttatttatgcagaggccgaggccg
cctctgcctctgagctattccagaagtagtgaggaggcttttttggaggcctaggcttttgcaaaaag
ctcccgggagcttgtatatccattttcggatctgatcaagagacaggatgaggatcgtttcgcatgat
tgaacaagatggattgcacgcaggttctccggccgcttgggtggagaggctattcggctatgactggg
cacaacagacaatcggctgctctgatgccgccgtgttccggctgtcagcgcaggggcgcccggttctt
tttgtcaagaccgacctgtccggtgccctgaatgaactgcaggacgaggcagcgcggctatcgtggct
ggccacgacgggcgttccttgcgcagctgtgctcgacgttgtcactgaagcgggaagggactggctgc
tattgggcgaagtgccggggcaggatctcctgtcatctcaccttgctcctgccgagaaagtatccatc
atggctgatgcaatgcggcggctgcatacgcttgatccggctacctgcccattcgaccaccaagcgaa
acatcgcatcgagcgagcacgtactcggatggaagccggtcttgtcgatcaggatgatctggacgaag
agcatcaggggctcgcgccagccgaactgttcgccaggctcaaggcgcgcatgcccgacggcgaggat
ctcgtcgtgacccatggcgatgcctgcttgccgaatatcatggtggaaaatggccgcttttctggatt
catcgactgtggccggctgggtgtggcggaccgctatcaggacatagcgttggctacccgtgatattg
ctgaagagcttggcggcgaatgggctgaccgcttcctcgtgctttacggtatcgccgctcccgattcg
cagcgcatcgccttctatcgccttcttgacgagttcttctgagcgggactctggggttcgaaatgacc
gaccaagcgacgcccaacctgccatcacgagatttcgattccaccgccgccttctatgaaaggttggg
cttcggaatcgttttccgggacgccggctggatgatcctccagcgcggggatctcatgctggagttct
tcgcccaccccaacttgtttattgcagcttataatggttacaaataaagcaatagcatcacaaatttc
acaaataaagcatttttttcactgcattctagttgtggtttgtccaaactcatcaatgtatcttatca
tgtctgtataccgtcgacctctagctagagcttggcgtaatcatggtcatagctgtttcctgtgtgaa
attgttatccgctcacaattccacacaacatacgagccggaagcataaagtgtaaagcctggggtgcc
taatgagtgagctaactcacattaattgcgttgcgctcactgcccgctttccagtcgggaaacctgtc
gtgccagctgcattaatgaatcggccaacgcgcggggagaggcggtttgcgtattgggcgctcttccg
cttcctcgctcactgactcgctgcgctcggtcgttcggctgcggcgagcggtatcagctcactcaaag
gcggtaatacggttatccacagaatcaggggataacgcaggaaagaacatgtgagcaaaaggccagca
aaaggccaggaaccgtaaaaaggccgcgttgctggcgtttttccataggctccgcccccctgacgagc
atcacaaaaatcgacgctcaagtcagaggtggcgaaacccgacaggactataaagataccaggcgttt
ccccctggaagctccctcgtgcgctctcctgttccgaccctgccgcttaccggatacctgtccgcctt
tctcccttcgggaagcgtggcgctttctcatagctcacgctgtaggtatctcagttcggtgtaggtcg
ttcgctccaagctgggctgtgtgcacgaaccccccgttcagcccgaccgctgcgccttatccggtaac
tatcgtcttgagtccaacccggtaagacacgacttatcgccactggcagcagccactggtaacaggat
tagcagagcgaggtatgtaggcggtgctacagagttcttgaagtggtggcctaactacggctacacta
gaagaacagtatttggtatctgcgctctgctgaagccagttaccttcggaaaaagagttggtagctct
tgatccggcaaacaaaccaccgctggtagcggtttttttgtttgcaagcagcagattacgcgcagaaa
aaaaggatctcaagaagatcctttgatcttttctacggggtctgacgctcagtggaacgaaaactcac
gttaagggattttggtcatgagattatcaaaaaggatcttcacctagatccttttaaattaaaaatga
agttttaaatcaatctaaagtatatatgagtaaacttggtctgacagttaccaatgcttaatcagtga
ggcacctatctcagcgatctgtctatttcgttcatccatagttgcctgactccccgtcgtgtagataa
ctacgatacgggagggcttaccatctggccccagtgctgcaatgataccgcgagacccacgctcaccg
gctccagatttatcagcaataaaccagccagccggaagggccgagcgcagaagtggtcctgcaacttt
atccgcctccatccagtctattaattgttgccgggaagctagagtaagtagttcgccagttaatagtt
tgcgcaacgttgttgccattgctacaggcatcgtggtgtcacgctcgtcgtttggtatggcttcattc
agctccggttcccaacgatcaaggcgagttacatgatcccccatgttgtgcaaaaaagcggttagctc
cttcggtcctccgatcgttgtcagaagtaagttggccgcagtgttatcactcatggttatggcagcac
tgcataattctcttactgtcatgccatccgtaagatgcttttctgtgactggtgagtactcaaccaag
tcattctgagaatagtgtatgcggcgaccgagttgctcttgcccggcgtcaatacgggataataccgc
gccacatagcagaactttaaaagtgctcatcattggaaaacgttcttcggggcgaaaactctcaagga
tcttaccgctgttgagatccagttcgatgtaacccactcgtgcacccaactgatcttcagcatctttt
actttcaccagcgtttctgggtgagcaaaaacaggaaggcaaaatgccgcaaaaaagggaataagggc
gacacggaaatgttgaatactcatactcttcctttttcaatattattgaagcatttatcagggttatt
gtctcatgagcggatacatatttgaatgtatttagaaaaataaacaaataggggttccgcgcacattt
ccccgaaaagtgccacctgacgtc
pMD142-MSCV-hACE2-T2A-BFP-3xFLAG
SEQ ID NO: 119
gaccccacctgtaggtttggcaagctagcttaagtaacgccattttgcaaggcatggaaaatacataa
ctgagaatagagaagttcagatcaaggttaggaacagagagacagcagaatatgggccaaacaggata
tctgtggtaagcagttcctgccccggctcagggccaagaacagatggtccccagatgcggtcccgccc
tcagcagtttctagagaaccatcagatgtttccagggtgccccaaggacctgaaatgaccctgtgcct
tatttgaactaaccaatcagttcgcttctcgcttctgttcgcgcgcttctgctccccgagctcaataa
aagagcccacaacccctcactcggcgcgccagtcctccgatagactgcgtcgcccgggtacccgtatt
cccaataaagcctcttgctgtttgcatccgaatcgtggactcgctgatccttgggagggtctcctcag
attgattgactgcccacctcgggggtctttcatttggaggttccaccgagatttggagacccctgccc
agggaccaccgacccccccgccgggaggtaagctggccagcggtcgtttcgtgtctgtctctgtcttt
gtgcgtgtttgtgccggcatctaatgtttgcgcctgcgtctgtactagttagctaactagctctgtat
ctggcggacccgtggtggaactgacgagttctgaacacccggccgcaaccctgggagacgtcccaggg
actttgggggccgtttttgtggcccgacctgaggaagggagtcgatgtggaatccgaccccgtcagga
tatgtggttctggtaggagacgagaacctaaaacagttcccgcctccgtctgaatttttgctttcggt
ttggaaccgaagccgcgcgtcttgtctgctgcagcgctgcagcatcgttctgtgttgtctctgtctga
ctgtgtttctgtatttgtctgaaaattagggccagactgttaccactcccttaagtttgaccttaggt
cactggaaagatgtcgagcggatcgctcacaaccagtcggtagatgtcaagaagagacgttgggttac
cttctgctctgcagaatggccaacctttaacgtcggatggccgcgagacggcacctttaaccgagacc
tcatcacccaggttaagatcaaggtcttttcacctggcccgcatggacacccagaccaggtcccctac
atcgtgacctgggaagccttggcttttgacccccctccctgggtcaagccctttgtacaccctaagcc
tccgcctcctcttcctccatccgccccgtctctcccccttgaacctcctcgttcgaccccgcctcgat
cctccctttatccagccctcactccttctctaggcgccggaattagatctctcgagatcgatgccttg
agacaaatggcagtattcatccacaattttaaaagaaaaggggggattggggggtacagtgcagggga
aagaatagtagacataatagcaacagacatacaaactaaagaattacaaaaacaaattacaaaaattc
aaaattttcgggtttattacagggacagcagagatccactttggcgccggctcgagggggcccgggga
attcgctagctaggtcttgaaaggagtgggaattggctccggtgcccgtcagtgggcagagcgcacat
cgcccacagtccccgagaagttggggggaggggtcggcaattgatccggtgcctagagaaggtggcgc
ggggtaaactgggaaagtgatgtcgtgtactggctccgcctttttcccgagggtgggggagaaccgta
tataagtgcagtagtcgccgtgaacgttctttttcgcaacgggtttgccgccagaacacaggaccggt
tctagacgtacggccaccATGCCACTGCTGCTCTTGCTGCCTCTGCTTTGGGCTGGAGCTCTGGCTGA
TTACAAGGATGACGACGATAAGGGTGGAGGCGGTAGCCAGTCCACCATTGAGGAACAGGCCAAGACAT
TTTTGGACAAGTTTAACCACGAAGCCGAAGACCTGTTCTATCAAAGTTCACTTGCTTCTTGGAATTAT
AACACCAATATTACTGAAGAGAATGTCCAAAACATGAATAATGCTGGGGACAAATGGTCTGCCTTTTT
AAAGGAACAGTCCACACTTGCCCAAATGTATCCACTACAAGAAATTCAGAATCTCACAGTCAAGCTTC
AGCTGCAGGCTCTTCAGCAAAATGGGTCTTCAGTGCTCTCAGAAGACAAGAGCAAACGGTTGAACACA
ATTCTAAATACAATGAGCACCATCTACAGTACTGGAAAAGTTTGTAACCCAGATAATCCACAAGAATG
CTTATTACTTGAACCAGGTTTGAATGAAATAATGGCAAACAGTTTAGACTACAATGAGAGGCTCTGGG
CTTGGGAAAGCTGGAGATCTGAGGTCGGCAAGCAGCTGAGGCCATTATATGAAGAGTATGTGGTCTTG
AAAAATGAGATGGCAAGAGCAAATCATTATGAGGACTATGGGGATTATTGGAGAGGAGACTATGAAGT
AAATGGGGTAGATGGCTATGACTACAGCCGCGGCCAGTTGATTGAAGATGTGGAACATACCTTTGAAG
AGATTAAACCATTATATGAACATCTTCATGCCTATGTGAGGGCAAAGTTGATGAATGCCTATCCTTCC
TATATCAGTCCAATTGGATGCCTCCCTGCTCATTTGCTTGGTGATATGTGGGGTAGATTTTGGACAAA
TCTGTACTCTTTGACAGTTCCCTTTGGACAGAAACCAAACATAGATGTTACTGATGCAATGGTGGACC
AGGCCTGGGATGCACAGAGAATATTCAAGGAGGCCGAGAAGTTCTTTGTATCTGTTGGTCTTCCTAAT
ATGACTCAAGGATTCTGGGAAAATTCCATGCTAACGGACCCAGGAAATGTTCAGAAAGCAGTCTGCCA
TCCCACAGCTTGGGACCTGGGGAAGGGCGACTTCAGGATCCTTATGTGCACAAAGGTGACAATGGACG
ACTTCCTGACAGCTCATCATGAGATGGGGCATATCCAGTATGATATGGCATATGCTGCACAACCTTTT
CTGCTAAGAAATGGAGCTAATGAAGGATTCCATGAAGCTGTTGGGGAAATCATGTCACTTTCTGCAGC
CACACCTAAGCATTTAAAATCCATTGGTCTTCTGTCACCCGATTTTCAAGAAGACAATGAAACAGAAA
TAAACTTCCTGCTCAAACAAGCACTCACGATTGTTGGGACTCTGCCATTTACTTACATGTTAGAGAAG
TGGAGGTGGATGGTCTTTAAAGGGGAAATTCCCAAAGACCAGTGGATGAAAAAGTGGTGGGAGATGAA
GCGAGAGATAGTTGGGGTGGTGGAACCTGTGCCCCATGATGAAACATACTGTGACCCCGCATCTCTGT
TCCATGTTTCTAATGATTACTCATTCATTCGATATTACACAAGGACCCTTTACCAATTCCAGTTTCAA
GAAGCACTTTGTCAAGCAGCTAAACATGAAGGCCCTCTGCACAAATGTGACATCTCAAACTCTACAGA
AGCTGGACAGAAACTGTTCAATATGCTGAGGCTTGGAAAATCAGAACCCTGGACCCTAGCATTGGAAA
ATGTTGTAGGAGCAAAGAACATGAATGTAAGGCCACTGCTCAACTACTTTGAGCCCTTATTTACCTGG
CTGAAAGACCAGAACAAGAATTCTTTTGTGGGATGGAGTACCGACTGGAGTCCATATGCAGACCAAAG
CATCAAAGTGAGGATAAGCCTAAAATCAGCTCTTGGAGATAAAGCATATGAATGGAACGACAATGAAA
TGTACCTGTTCCGATCATCTGTTGCATATGCTATGAGGCAGTACTTTTTAAAAGTAAAAAATCAGATG
ATTCTTTTTGGGGAGGAGGATGTGCGAGTGGCTAATTTGAAACCAAGAATCTCCTTTAATTTCTTTGT
CACTGCACCTAAAAATGTGTCTGATATCATTCCTAGAACTGAAGTTGAAAAGGCCATCAGGATGTCCC
GGAGCCGTATCAATGATGCTTTCCGTCTGAATGACAACAGCCTAGAGTTTCTGGGGATACAGCCAACA
CTTGGACCTCCTAACCAGCCCCCTGTTTCCATATGGCTGATTGTTTTTGGAGTTGTGATGGGAGTGAT
AGTGGTTGGCATTGTCATCCTGATCTTCACTGGGATCAGAGATCGGAAGAAGAAAAATAAAGCAAGAA
GTGGAGAAAATCCTTATGCCTCCATCGATATTAGCAAAGGAGAAAATAATCCAGGATTCCAAAACACT
GATGATGTTCAGACCTCCTTTttcgaaggatccggcgcaacaaacttctctctgctgaaacaagccgg
agatgtcgaagagaatcctggaccgatggtgtctaagggcgaagagctgattaaggagaacatgcaca
tgaagctgtacatggagggcaccgtggacaaccatcacttcaagtgcacatccgagggcgaaggcaag
ccctacgagggcacccagaccatgagaatcaaggtggtcgagggcggccctctccccttcgccttcga
catcctggctactagcttcctctacggcagcaagaccttcatcaaccacacccagggcatccccgact
tcttcaagcagtccttccctgagggcttcacatgggagagagtcaccacatacgaagatgggggcgtg
ctgaccgctacccaggacaccagcctccaggacggctgcctcatctacaacgtcaagatcagaggggt
gaacttcacatccaacggccctgtgatgcagaagaaaacactcggctgggaggccttcaccgagacgc
tgtaccccgctgacggcggcctggaaggcagaaacgacatggccctgaagctcgtgggcgggagccat
ctgatcgcaaacgccaagaccacatatagatccaagaaacccgctaagaacctcaagatgcctggcgt
ctactatgtggactacagactggaaagaatcaaggaggccaacaacgagacctacgtcgagcagcacg
aggtggcagtggccagatactgcgacctccctagcaaactggggcacaagcttaatacgcgtgactac
aaagaccatgacggtgattataaagatcatgacatcgattacaaggatgacgatgacaagtaaggatc
caataaaagatctttattttcattagatctgtgtgttggttttttgtgtcgataaaataaaagatttt
atttagtctccagaaaaaggggggaatgaaagaccccacctgtaggtttggcaagctagcttaagtaa
cgccattttgcaaggcatggaaaatacataactgagaatagagaagttcagatcaaggttaggaacag
agagacagcagaatatgggccaaacaggatatctgtggtaagcagttcctgccccggctcagggccaa
gaacagatggtccccagatgcggtcccgccctcagcagtttctagagaaccatcagatgtttccaggg
tgccccaaggacctgaaatgaccctgtgccttatttgaactaaccaatcagttcgcttctcgcttctg
ttcgcgcgcttctgctccccgagctcaataaaagagcccacaacccctcactcggcgcgccagtcctc
cgatagactgcgtcgcccgggtacccgtgtatccaataaaccctcttgcagttgcatccgacttgtgg
tctcgctgttccttgggagggtctcctctgagtgattgactacccgtcagcgggggtctttcatgggt
aacagtttcttgaagttggagaacaacattctgagggtaggagtcgaatattaagtaatcctgactca
attagccactgttttgaatccacatactccaatactcctgaaatagttcattatggacagcgcagaaa
gagctggggagaattgtgaaattgttatccgctcacaattccacacaacatacgagccggaagcataa
agtgtaaagcctggggtgcctaatgagtgagctaactcacattaattgcgttgcgctcactgcccgct
ttccagtcgggaaacctgtcgtgccagctgcattaatgaatcggccaacgcgcggggagaggcggttt
gcgtattgggcgctcttccgcttcctcgctcactgactcgctgcgctcggtcgttcggctgcggcgag
cggtatcagctcactcaaaggcggtaatacggttatccacagaatcaggggataacgcaggaaagaac
atgtgagcaaaaggccagcaaaaggccaggaaccgtaaaaaggccgcgttgctggcgtttttccatag
gctccgcccccctgacgagcatcacaaaaatcgacgctcaagtcagaggtggcgaaacccgacaggac
tataaagataccaggcgtttccccctggaagctccctcgtgcgctctcctgttccgaccctgccgctt
accggatacctgtccgcctttctcccttcgggaagcgtggcgctttctcatagctcacgctgtaggta
tctcagttcggtgtaggtcgttcgctccaagctgggctgtgtgcacgaaccccccgttcagcccgacc
gctgcgccttatccggtaactatcgtcttgagtccaacccggtaagacacgacttatcgccactggca
gcagccactggtaacaggattagcagagcgaggtatgtaggcggtgctacagagttcttgaagtggtg
gcctaactacggctacactagaagaacagtatttggtatctgcgctctgctgaagccagttaccttcg
gaaaaagagttggtagctcttgatccggcaaacaaaccaccgctggtagcggtggtttttttgtttgc
aagcagcagattacgcgcagaaaaaaaggatctcaagaagatcctttgatcttttctacggggtctga
cgctcagtggaacgaaaactcacgttaagggattttggtcatgagattatcaaaaaggatcttcacct
agatccttttaaattaaaaatgaagttttaaatcaatctaaagtatatatgagtaaacttggtctgac
agttaccaatgcttaatcagtgaggcacctatctcagcgatctgtctatttcgttcatccatagttgc
ctgactccccgtcgtgtagataactacgatacgggagggcttaccatctggccccagtgctgcaatga
taccgcgagacccacgctcaccggctccagatttatcagcaataaaccagccagccggaagggccgag
cgcagaagtggtcctgcaactttatccgcctccatccagtctattaattgttgccgggaagctagagt
aagtagttcgccagttaatagtttgcgcaacgttgttgccattgctacaggcatcgtggtgtcacgct
cgtcgtttggtatggcttcattcagctccggttcccaacgatcaaggcgagttacatgatcccccatg
ttgtgcaaaaaagcggttagctccttcggtcctccgatcgttgtcagaagtaagttggccgcagtgtt
atcactcatggttatggcagcactgcataattctcttactgtcatgccatccgtaagatgcttttctg
tgactggtgagtactcaaccaagtcattctgagaatagtgtatgcggcgaccgagttgctcttgcccg
gcgtcaatacgggataataccgcgccacatagcagaactttaaaagtgctcatcattggaaaacgttc
ttcggggcgaaaactctcaaggatcttaccgctgttgagatccagttcgatgtaacccactcgtgcac
ccaactgatcttcagcatcttttactttcaccagcgtttctgggtgagcaaaaacaggaaggcaaaat
gccgcaaaaaagggaataagggcgacacggaaatgttgaatactcatactcttcctttttcaatatta
ttgaagcatttatcagggttattgtctcatgagcggatacatatttgaatgtatttagaaaaataaac
aaataggggttccgcgcacatttccccgaaaagtgccacctgacgtctaagaaaccattattatcatg
acattaacctataaaaataggcgtatcacgaggccctttcgtctcgcgcgtttcggtgatgacggtga
aaacctctgacacatgcagctcccggagacggtcacagcttgtctgtaagcggatgccgggagcagac
aagcccgtcagggcgcgtcagcgggtgttggcgggtgtcggggctggcttaactatgcggcatcagag
cagattgtactgagagtgcaccatatgcggtgtgaaataccgcacagatgcgtaaggagaaaataccg
catcaggcgccattcgccattcaggctgcgcaactgttgggaagggcgatcggtgcgggcctcttcgc
tattacgccagctggcgaaagggggatgtgctgcaaggcgattaagttgggtaacgccagggttttcc
cagtcacgacgttgtaaaacgacggcgcaaggaatggtgcatgcaaggagatggcgcccaacagtccc
ccggccacggggcctgccaccatacccacgccgaaacaagcgctcatgagcccgaagtggcgagcccg
atcttccccatcggtgatgtcggcgatataggcgccagcaaccgcacctgtggcgccggtgatgccgg
ccacgatgcgtccggcgtagaggcgattagtccaatttgttaaagacaggatatcagtggtccaggct
ctagttttgactcaacaatatcaccagctgaagcctatagagtacgagccatagataaaataaaagat
tttatttagtctccagaaaaaggggggaatgaaa
pMD143-pAAV-EF1a-N protein-2A-Scarlet-FLAG-BGH
SEQ ID NO: 120
cctgcaggcagctgcgcgctcgctcgctcactgaggccgcccgggcaaagcccgggcgtcgggcgacc
tttggtcgcccggcctcagtgagcgagcgagcgcgcagagagggagtggccaactccatcactagggg
ttcctgcggccgcaGCTCCGGTGCCCGTCAGTGGGCAGAGCGCACATCGCCCACAGTCCCCGAGAAGT
TGGGGGGAGGGGTCGGCAATTGAACCGGTGCCTAGAGAAGGTGGCGCGGGGTAAACTGGGAAAGTGAT
GTCGTGTACTGGCTCCGCCTTTTTCCCGAGGGTGGGGGAGAACCGTATATAAGTGCAGTAGTCGCCGT
GAACGTTCTTTTTCGCAACGGGTTTGCCGCCAGAACACAGGTAAGTGCCGTGTGTGGTTCCCGCGGGC
CTGGCCTCTTTACGGGTTATGGCCCTTGCGTGCCTTGAATTACTTCCACGCCCCTGGCTGCAGTACGT
GATTCTTGATCCCGAGCTTCGGGTTGGAAGTGGGTGGGAGAGTTCGAGGCCTTGCGCTTAAGGAGCCC
CTTCGCCTCGTGCTTGAGTTGAGGCCTGGCTTGGGCGCTGGGGCCGCCGCGTGCGAATCTGGTGGCAC
CTTCGCGCCTGTCTCGCTGCTTTCGATAAGTCTCTAGCCATTTAAAATTTTTGATGACCTGCTGCGAC
GCTTTTTTTCTGGCAAGATAGTCTTGTAAATGCGGGCCAAGATCTGCACACTGGTATTTCGGTTTTTG
GGGCCGCGGGCGGCGACGGGGCCCGTGCGTCCCAGCGCACATGTTCGGCGAGGCGGGGCCTGCGAGCG
CGGCCACCGAGAATCGGACGGGGGTAGTCTCAAGCTGGCCGGCCTGCTCTGGTGCCTGGCCTCGCGCC
GCCGTGTATCGCCCCGCCCTGGGCGGCAAGGCTGGCCCGGTCGGCACCAGTTGCGTGAGCGGAAAGAT
GGCCGCTTCCCGGCCCTGCTGCAGGGAGCTCAAAATGGAGGACGCGGCGCTCGGGAGAGCGGGCGGGT
GAGTCACCCACACAAAGGAAAAGGGCCTTTCCGTCCTCAGCCGTCGCTTCATGTGACTCCACGGAGTA
CCGGGCGCCGTCCAGGCACCTCGATTAGTTCTCGAGCTTTTGGAGTACGTCGTCTTTAGGTTGGGGGG
AGGGGTTTTATGCGATGGAGTTTCCCCACACTGAGTGGGTGGAGACTGAAGTTAGGCCAGCTTGGCAC
TTGATGTAATTCTCCTTGGAATTTGCCCTTTTTGAGTTTGGATCTTGGTTCATTCTCAAGCCTCAGAC
AGTGGTTCAAAGTTTTTTTCTTCCATTTCAGGTGTCGTGAGGATCTATTTCCGGTGAATTCGCCGCCA
CCATGAGCGATAACGGCCCCCAAAACCAACGGAATGCCCCTCGGATAACATTTGGTGGCCCTAGTGAT
TCCACAGGAAGTAACCAAAACGGAGAACGGTCTGGAGCCCGCTCTAAACAGAGGCGACCACAGGGATT
GCCAAATAACACAGCGTCATGGTTTACAGCCCTGACTCAACATGGAAAGGAGGACTTGAAATTTCCAC
GAGGACAGGGTGTACCAATAAACACAAACAGTAGTCCAGACGATCAGATCGGGTATTATAGAAGGGCC
ACGAGACGCATCAGAGGTGGAGATGGTAAAATGAAAGATCTCAGTCCGCGCTGGTACTTTTATTATTT
GGGAACCGGCCCAGAAGCGGGCCTCCCATATGGAGCCAATAAGGACGGGATTATATGGGTGGCTACAG
AGGGAGCCCTCAATACGCCAAAAGATCACATCGGAACAAGAAACCCTGCTAATAATGCCGCAATCGTG
CTGCAGTTGCCTCAGGGGACGACGCTTCCTAAAGGCTTTTACGCAGAAGGATCACGCGGCGGCAGCCA
AGCATCCTCAAGGTCTAGTTCCAGAAGTCGAAACAGCTCCAGAAACTCCACACCAGGGTCCAGTAGGG
GCACAAGTCCGGCGCGGATGGCGGGCAACGGCGGAGACGCCGCACTCGCTCTGTTGCTCCTGGACCGG
CTCAACCAACTTGAATCCAAGATGAGTGGTAAGGGACAGCAGCAACAAGGTCAAACCGTAACCAAGAA
AAGCGCTGCAGAAGCTTCTAAAAAACCTCGACAAAAACGGACCGCTACGAAGGCATATAACGTTACTC
AAGCCTTCGGGAGACGAGGGCCGGAGCAAACCCAGGGGAATTTTGGAGATCAGGAGCTCATCCGGCAA
GGGACAGATTACAAACATTGGCCTCAAATCGCTCAGTTCGCGCCGTCCGCAAGTGCTTTTTTCGGAAT
GTCTCGCATCGGTATGGAAGTAACACCATCCGGGACATGGCTCACTTATACCGGCGCCATCAAGCTGG
ACGACAAAGATCCAAATTTCAAAGATCAGGTGATTCTCTTGAATAAACACATAGACGCGTATAAGACG
TTTCCACCCACCGAACCCAAGAAGGACAAAAAGAAAAAAGCTGATGAAACACAAGCGTTGCCCCAGCG
ACAGAAGAAGCAGCAAACCGTCACCCTCCTGCCAGCCGCTGATCTCGATGACTTCTCCAAGCAACTTC
AACAGTCCATGAGCTCAGCCGATTCTACTCAGGCGggcagtggagagggcagaggaagtctgctaaca
tgcggtgacgtcgaggagaatcctggcccaatgagtaaaggagaagctgtgattaaagagttcatgcg
cttcaaagttcacatggagggttctatgaacggtcacgagttcgagatcgaaggcgaaggcgagggcc
gtccgtatgaaggcacccagaccgccaaactgaaagtgactaaaggcggcccgctgcctttttcctgg
gacatcctgagcccgcaatttatgtacggttctagggcgttcaccaaacacccagcggatatcccgga
ctattataagcagtcttttccggaaggtttcaagtgggaacgcgtaatgaattttgaagatggtggtg
ccgtgaccgtcactcaggacacctccctggaggatggcaccctgatctataaagttaaactgcgtggt
actaattttccacctgatggcccggtgatgcagaaaaagacgatgggttgggaggcgtctaccgaacg
cttgtatccggaagatggtgtgctgaaaggcgacattaaaatggccctgcgcctgaaagatggcggcc
gctatctggctgacttcaaaaccacgtacaaagccaagaaacctgtgcagatgcctggcgcgtacaat
gtggaccgcaaactggacatcacctctcataatgaagattatacggtggtagagcaatatgagcgctc
cgagggtcgtcattctaccggtggcatggatgaactatacaaataagtttaaacccgctgatcagcct
cgactgtgccttctagttgccagccatctgttgtttgcccctcccccgtgccttccttgaccctggaa
ggtgccactcccactgtcctttcctaataaaatgaggaaattgcatcgcattgtctgagtaggtgtca
ttctattctggggggtggggtggggcaggacagcaagggggaggattgggaagacaatagcaggcatg
ctggggatgcggtgggctctatgggaccgagcggccgcaggaacccctagtgatggagttggccactc
cctctctgcgcgctcgctcgctcactgaggccgggcgaccaaaggtcgcccgacgcccgggctttgcc
cgggcggcctcagtgagcgagcgagcgcgcagctgcctgcaggggcgcctgatgcggtattttctcct
tacgcatctgtgcggtatttcacaccgcatacgtcaaagcaaccatagtacgcgccctgtagcggcgc
attaagcgcggcgggtgtggtggttacgcgcagcgtgaccgctacacttgccagcgccctagcgcccg
ctcctttcgctttcttcccttcctttctcgccacgttcgccggctttccccgtcaagctctaaatcgg
gggctccctttagggttccgatttagtgctttacggcacctcgaccccaaaaaacttgatttgggtga
tggttcacgtagtgggccatcgccctgatagacggtttttcgccctttgacgttggagtccacgttct
ttaatagtggactcttgttccaaactggaacaacactcaaccctatctcgggctattcttttgattta
taagggattttgccgatttcggcctattggttaaaaaatgagctgatttaacaaaaatttaacgcgaa
ttttaacaaaatattaacgtttacaattttatggtgcactctcagtacaatctgctctgatgccgcat
agttaagccagccccgacacccgccaacacccgctgacgcgccctgacgggcttgtctgctcccggca
tccgcttacagacaagctgtgaccgtctccgggagctgcatgtgtcagaggttttcaccgtcatcacc
gaaacgcgcgagacgaaagggcctcgtgatacgcctatttttataggttaatgtcatgataataatgg
tttcttagacgtcaggtggcacttttcggggaaatgtgcgcggaacccctatttgtttatttttctaa
atacattcaaatatgtatccgctcatgagacaataaccctgataaatgcttcaataatattgaaaaag
gaagagtatgagtattcaacatttccgtgtcgcccttattcccttttttgcggcattttgccttcctg
tttttgctcacccagaaacgctggtgaaagtaaaagatgctgaagatcagttgggtgcacgagtgggt
tacatcgaactggatctcaacagcggtaagatccttgagagttttcgccccgaagaacgttttccaat
gatgagcacttttaaagttctgctatgtggcgcggtattatcccgtattgacgccgggcaagagcaac
tcggtcgccgcatacactattctcagaatgacttggttgagtactcaccagtcacagaaaagcatctt
acggatggcatgacagtaagagaattatgcagtgctgccataaccatgagtgataacactgcggccaa
cttacttctgacaacgatcggaggaccgaaggagctaaccgcttttttgcacaacatgggggatcatg
taactcgccttgatcgttgggaaccggagctgaatgaagccataccaaacgacgagcgtgacaccacg
atgcctgtagcaatggcaacaacgttgcgcaaactattaactggcgaactacttactctagcttcccg
gcaacaattaatagactggatggaggcggataaagttgcaggaccacttctgcgctcggcccttccgg
ctggctggtttattgctgataaatctggagccggtgagcgtgggtctcgcggtatcattgcagcactg
gggccagatggtaagccctcccgtatcgtagttatctacacgacggggagtcaggcaactatggatga
acgaaatagacagatcgctgagataggtgcctcactgattaagcattggtaactgtcagaccaagttt
actcatatatactttagattgatttaaaacttcatttttaatttaaaaggatctaggtgaagatcctt
tttgataatctcatgaccaaaatcccttaacgtgagttttcgttccactgagcgtcagaccccgtaga
aaagatcaaaggatcttcttgagatcctttttttctgcgcgtaatctgctgcttgcaaacaaaaaaac
caccgctaccagcggtggtttgtttgccggatcaagagctaccaactctttttccgaaggtaactggc
ttcagcagagcgcagataccaaatactgtccttctagtgtagccgtagttaggccaccacttcaagaa
ctctgtagcaccgcctacatacctcgctctgctaatcctgttaccagtggctgctgccagtggcgata
agtcgtgtcttaccgggttggactcaagacgatagttaccggataaggcgcagcggtcgggctgaacg
gggggttcgtgcacacagcccagcttggagcgaacgacctacaccgaactgagatacctacagcgtga
gctatgagaaagcgccacgcttcccgaagggagaaaggcggacaggtatccggtaagcggcagggtcg
gaacaggagagcgcacgagggagcttccagggggaaacgcctggtatctttatagtcctgtcgggttt
cgccacctctgacttgagcgtcgatttttgtgatgctcgtcaggggggcggagcctatggaaaaacgc
cagcaacgcggcctttttacggttcctggccttttgctggccttttgctcacatgt
pMD144_pAAV-EFS-S protein-TA-M protein
SEQ ID NO: 121
cctgcaggcagctgcgcgctcgctcgctcactgaggccgcccgggcaaagcccgggcgtcgggcgacc
tttggtcgcccggcctcagtgagcgagcgagcgcgcagagagggagtggccaactccatcactagggg
ttcctgcggccgcataggtcttgaaaggagtgggaattggctccggtgcccgtcagtgggcagagcgc
acatcgcccacagtccccgagaagttggggggaggggtcggcaattgatccggtgcctagagaaggtg
gcgcggggtaaactgggaaagtgatgtcgtgtactggctccgcctttttcccgagggtgggggagaac
cgtatataagtgcagtagtcgccgtgaacgttctttttcgcaacgggtttgccgccagaacacaggac
cggttctagacgtacggccaccATGTTTGTGTTCCTGGTGCTGCTGCCACTGGTGTCCAGCCAGTGTG
TGAACCTGACCACCAGGACCCAACTTCCTCCTGCCTACACCAACTCCTTCACCAGGGGAGTCTACTAC
CCTGACAAGGTGTTCAGGTCCTCTGTGCTGCACAGCACCCAGGACCTGTTCCTGCCATTCTTCAGCAA
TGTGACCTGGTTCCATGCCATCCATGTGTCTGGCACCAATGGCACCAAGAGGTTTGACAACCCTGTGC
TGCCATTCAATGATGGAGTCTACTTTGCCAGCACAGAGAAGAGCAACATCATCAGGGGCTGGATTTTT
GGCACCACCCTGGACAGCAAGACCCAGTCCCTGCTGATTGTGAACAATGCCACCAATGTGGTGATTAA
GGTGTGTGAGTTCCAGTTCTGTAATGACCCATTCCTGGGAGTCTACTACCACAAGAACAACAAGTCCT
GGATGGAGTCTGAGTTCAGGGTCTACTCCTCTGCCAACAACTGTACCTTTGAATATGTGAGCCAACCA
TTCCTGATGGACTTGGAGGGCAAGCAGGGCAACTTCAAGAACCTGAGGGAGTTTGTGTTCAAGAACAT
TGATGGCTACTTCAAGATTTACAGCAAACACACACCAATCAACCTGGTGAGGGACCTGCCACAGGGCT
TCTCTGCCTTGGAACCACTGGTGGACCTGCCAATTGGCATCAACATCACCAGGTTCCAGACCCTGCTG
GCTCTGCACAGGTCCTACCTGACACCTGGAGACTCCTCCTCTGGCTGGACAGCAGGAGCAGCAGCCTA
CTATGTGGGCTACCTCCAACCAAGGACCTTCCTGCTGAAATACAATGAGAATGGCACCATCACAGATG
CTGTGGACTGTGCCCTGGACCCACTGTCTGAGACCAAGTGTACCCTGAAATCCTTCACAGTGGAGAAG
GGCATCTACCAGACCAGCAACTTCAGGGTCCAACCAACAGAGAGCATTGTGAGGTTTCCAAACATCAC
CAACCTGTGTCCATTTGGAGAGGTGTTCAATGCCACCAGGTTTGCCTCTGTCTATGCCTGGAACAGGA
AGAGGATTAGCAACTGTGTGGCTGACTACTCTGTGCTCTACAACTCTGCCTCCTTCAGCACCTTCAAG
TGTTATGGAGTGAGCCCAACCAAACTGAATGACCTGTGTTTCACCAATGTCTATGCTGACTCCTTTGT
GATTAGGGGAGATGAGGTGAGACAGATTGCCCCTGGACAAACAGGCAAGATTGCTGACTACAACTACA
AACTGCCTGATGACTTCACAGGCTGTGTGATTGCCTGGAACAGCAACAACCTGGACAGCAAGGTGGGA
GGCAACTACAACTACCTCTACAGACTGTTCAGGAAGAGCAACCTGAAACCATTTGAGAGGGACATCAG
CACAGAGATTTACCAGGCTGGCAGCACACCATGTAATGGAGTGGAGGGCTTCAACTGTTACTTTCCAC
TCCAATCCTATGGCTTCCAACCAACCAATGGAGTGGGCTACCAACCATACAGGGTGGTGGTGCTGTCC
TTTGAACTGCTCCATGCCCCTGCCACAGTGTGTGGACCAAAGAAGAGCACCAACCTGGTGAAGAACAA
GTGTGTGAACTTCAACTTCAATGGACTGACAGGCACAGGAGTGCTGACAGAGAGCAACAAGAAGTTCC
TGCCATTCCAACAGTTTGGCAGGGACATTGCTGACACCACAGATGCTGTGAGGGACCCACAGACCTTG
GAGATTCTGGACATCACACCATGTTCCTTTGGAGGAGTGTCTGTGATTACACCTGGCACCAACACCAG
CAACCAGGTGGCTGTGCTCTACCAGGATGTGAACTGTACTGAGGTGCCTGTGGCTATCCATGCTGACC
AACTTACACCAACCTGGAGGGTCTACAGCACAGGCAGCAATGTGTTCCAGACCAGGGCTGGCTGTCTG
ATTGGAGCAGAGCATGTGAACAACTCCTATGAGTGTGACATCCCAATTGGAGCAGGCATCTGTGCCTC
CTACCAGACCCAGACCAACAGCCCAAGGAGGGCAAGGTCTGTGGCAAGCCAGAGCATCATTGCCTACA
CAATGAGTCTGGGAGCAGAGAACTCTGTGGCTTACAGCAACAACAGCATTGCCATCCCAACCAACTTC
ACCATCTCTGTGACCACAGAGATTCTGCCTGTGAGTATGACCAAGACCTCTGTGGACTGTACAATGTA
TATCTGTGGAGACAGCACAGAGTGTAGCAACCTGCTGCTCCAATATGGCTCCTTCTGTACCCAACTTA
ACAGGGCTCTGACAGGCATTGCTGTGGAACAGGACAAGAACACCCAGGAGGTGTTTGCCCAGGTGAAG
CAGATTTACAAGACACCTCCAATCAAGGACTTTGGAGGCTTCAACTTCAGCCAGATTCTGCCTGACCC
AAGCAAGCCAAGCAAGAGGTCCTTCATTGAGGACCTGCTGTTCAACAAGGTGACCCTGGCTGATGCTG
GCTTCATCAAGCAATATGGAGACTGTCTGGGAGACATTGCTGCCAGGGACCTGATTTGTGCCCAGAAG
TTCAATGGACTGACAGTGCTGCCTCCACTGCTGACAGATGAGATGATTGCCCAATACACCTCTGCCCT
GCTGGCTGGCACCATCACCTCTGGCTGGACCTTTGGAGCAGGAGCAGCCCTCCAAATCCCATTTGCTA
TGCAGATGGCTTACAGGTTCAATGGCATTGGAGTGACCCAGAATGTGCTCTATGAGAACCAGAAACTG
ATTGCCAACCAGTTCAACTCTGCCATTGGCAAGATTCAGGACTCCCTGTCCAGCACAGCCTCTGCCCT
GGGCAAACTCCAAGATGTGGTGAACCAGAATGCCCAGGCTCTGAACACCCTGGTGAAGCAACTTTCCA
GCAACTTTGGAGCCATCTCCTCTGTGCTGAATGACATCCTGAGCAGACTGGACAAGGTGGAGGCTGAG
GTCCAGATTGACAGACTGATTACAGGCAGACTCCAATCCCTCCAAACCTATGTGACCCAACAACTTAT
CAGGGCTGCTGAGATTAGGGCATCTGCCAACCTGGCTGCCACCAAGATGAGTGAGTGTGTGCTGGGAC
AAAGCAAGAGGGTGGACTTCTGTGGCAAGGGCTACCACCTGATGAGTTTTCCACAGTCTGCCCCTCAT
GGAGTGGTGTTCCTGCATGTGACCTATGTGCCTGCCCAGGAGAAGAACTTCACCACAGCCCCTGCCAT
CTGCCATGATGGCAAGGCTCACTTTCCAAGGGAGGGAGTGTTTGTGAGCAATGGCACCCACTGGTTTG
TGACCCAGAGGAACTTCTATGAACCACAGATTATCACCACAGACAACACCTTTGTGTCTGGCAACTGT
GATGTGGTGATTGGCATTGTGAACAACACAGTCTATGACCCACTCCAACCTGAACTGGACTCCTTCAA
GGAGGAACTGGACAAATACTTCAAGAACCACACCAGCCCTGATGTGGACCTGGGAGACATCTCTGGCA
TCAATGCCTCTGTGGTGAACATCCAGAAGGAGATTGACAGACTGAATGAGGTGGCTAAGAACCTGAAT
GAGTCCCTGATTGACCTCCAAGAACTGGGCAAATATGAACAATACATCAAGTGGCCATGGTACATCTG
GCTGGGCTTCATTGCTGGACTGATTGCCATTGTGATGGTGACCATAATGCTGTGTTGTATGACCTCCT
GTTGTTCCTGTCTGAAAGGCTGTTGTTCCTGTGGCTCCTGTTGTAAGTTTGATGAGGATGACTCTGAA
CCTGTGCTGAAAGGAGTGAAACTGCACTACACCggcagtggagagggcagaggaagtctgctaacatg
cggtgacgtcgaggagaatcctggcccaATGGCCGACTCAAATGGGACCATTACTGTAGAGGAGCTGA
AAAAACTGTTGGAGCAATGGAACCTTGTGATTGGATTTCTCTTCTTGACATGGATTTGTCTCCTGCAA
TTCGCATACGCGAATCGCAACCGATTCCTCTATATTATAAAACTTATATTCCTTTGGCTCCTGTGGCC
TGTGACCCTTGCCTGCTTCGTACTCGCGGCGGTGTATCGAATAAACTGGATAACTGGCGGCATAGCAA
TAGCTATGGCATGCCTGGTAGGTTTGATGTGGCTCTCCTATTTTATAGCGTCATTCAGACTTTTTGCA
CGCACGCGAAGCATGTGGTCATTTAACCCTGAAACAAATATCTTGCTTAATGTCCCCCTGCATGGCAC
AATTTTGACCCGACCGCTCCTTGAATCAGAATTGGTGATTGGAGCCGTGATCCTGAGGGGCCACTTGA
GGATCGCAGGACATCATCTTGGTCGCTGTGATATTAAGGATTTGCCAAAAGAAATAACTGTAGCTACC
AGTCGAACTTTGAGCTATTACAAGCTTGGAGCGTCCCAAAGGGTCGCTGGCGATAGTGGATTTGCAGC
CTATTCACGCTACAGGATAGGGAACTATAAACTGAATACAGACCACTCATCATCTTCTGATAACATTG
CTTTGCTCGTCCAGTGAgaattcAATAAAAGATCTTTATTTTCATTAGATCTGTGTGTTGGTTTTTTG
TGTgaccgagcggccgcaggaacccctagtgatggagttggccactccctctctgcgcgctcgctcgc
tcactgaggccgggcgaccaaaggtcgcccgacgcccgggctttgcccgggcggcctcagtgagcgag
cgagcgcgcagctgcctgcaggggcgcctgatgcggtattttctccttacgcatctgtgcggtatttc
acaccgcatacgtcaaagcaaccatagtacgcgccctgtagcggcgcattaagcgcggcgggtgtggt
ggttacgcgcagcgtgaccgctacacttgccagcgccctagcgcccgctcctttcgctttcttccctt
cctttctcgccacgttcgccggctttccccgtcaagctctaaatcgggggctccctttagggttccga
tttagtgctttacggcacctcgaccccaaaaaacttgatttgggtgatggttcacgtagtgggccatc
gccctgatagacggtttttcgccctttgacgttggagtccacgttctttaatagtggactcttgttcc
aaactggaacaacactcaaccctatctcgggctattcttttgatttataagggattttgccgatttcg
gcctattggttaaaaaatgagctgatttaacaaaaatttaacgcgaattttaacaaaatattaacgtt
tacaattttatggtgcactctcagtacaatctgctctgatgccgcatagttaagccagccccgacacc
cgccaacacccgctgacgcgccctgacgggcttgtctgctcccggcatccgcttacagacaagctgtg
accgtctccgggagctgcatgtgtcagaggttttcaccgtcatcaccgaaacgcgcgagacgaaaggg
cctcgtgatacgcctatttttataggttaatgtcatgataataatggtttcttagacgtcaggtggca
cttttcggggaaatgtgcgcggaacccctatttgtttatttttctaaatacattcaaatatgtatccg
ctcatgagacaataaccctgataaatgcttcaataatattgaaaaaggaagagtatgagtattcaaca
tttccgtgtcgcccttattcccttttttgcggcattttgccttcctgtttttgctcacccagaaacgc
tggtgaaagtaaaagatgctgaagatcagttgggtgcacgagtgggttacatcgaactggatctcaac
agcggtaagatccttgagagttttcgccccgaagaacgttttccaatgatgagcacttttaaagttct
gctatgtggcgcggtattatcccgtattgacgccgggcaagagcaactcggtcgccgcatacactatt
ctcagaatgacttggttgagtactcaccagtcacagaaaagcatcttacggatggcatgacagtaaga
gaattatgcagtgctgccataaccatgagtgataacactgcggccaacttacttctgacaacgatcgg
aggaccgaaggagctaaccgcttttttgcacaacatgggggatcatgtaactcgccttgatcgttggg
aaccggagctgaatgaagccataccaaacgacgagcgtgacaccacgatgcctgtagcaatggcaaca
acgttgcgcaaactattaactggcgaactacttactctagcttcccggcaacaattaatagactggat
ggaggcggataaagttgcaggaccacttctgcgctcggcccttccggctggctggtttattgctgata
aatctggagccggtgagcgtgggtctcgcggtatcattgcagcactggggccagatggtaagccctcc
cgtatcgtagttatctacacgacggggagtcaggcaactatggatgaacgaaatagacagatcgctga
gataggtgcctcactgattaagcattggtaactgtcagaccaagtttactcatatatactttagattg
atttaaaacttcatttttaatttaaaaggatctaggtgaagatcctttttgataatctcatgaccaaa
atcccttaacgtgagttttcgttccactgagcgtcagaccccgtagaaaagatcaaaggatcttcttg
agatcctttttttctgcgcgtaatctgctgcttgcaaacaaaaaaaccaccgctaccagcggtggttt
gtttgccggatcaagagctaccaactctttttccgaaggtaactggcttcagcagagcgcagatacca
aatactgtccttctagtgtagccgtagttaggccaccacttcaagaactctgtagcaccgcctacata
cctcgctctgctaatcctgttaccagtggctgctgccagtggcgataagtcgtgtcttaccgggttgg
actcaagacgatagttaccggataaggcgcagcggtcgggctgaacggggggttcgtgcacacagccc
agcttggagcgaacgacctacaccgaactgagatacctacagcgtgagctatgagaaagcgccacgct
tcccgaagggagaaaggcggacaggtatccggtaagcggcagggtcggaacaggagagcgcacgaggg
agcttccagggggaaacgcctggtatctttatagtcctgtcgggtttcgccacctctgacttgagcgt
cgatttttgtgatgctcgtcaggggggcggagcctatggaaaaacgccagcaacgcggcctttttacg
gttcctggccttttgctggccttttgctcacatgt
pMD145-pMSCV-EFS-N protein-TA-mScarlet
SEQ ID NO: 122
gaccccacctgtaggtttggcaagctagcttaagtaacgccattttgcaaggcatggaaaatacataa
ctgagaatagagaagttcagatcaaggttaggaacagagagacagcagaatatgggccaaacaggata
tctgtggtaagcagttcctgccccggctcagggccaagaacagatggtccccagatgcggtcccgccc
tcagcagtttctagagaaccatcagatgtttccagggtgccccaaggacctgaaatgaccctgtgcct
tatttgaactaaccaatcagttcgcttctcgcttctgttcgcgcgcttctgctccccgagctcaataa
aagagcccacaacccctcactcggcgcgccagtcctccgatagactgcgtcgcccgggtacccgtatt
cccaataaagcctcttgctgtttgcatccgaatcgtggactcgctgatccttgggagggtctcctcag
attgattgactgcccacctcgggggtctttcatttggaggttccaccgagatttggagacccctgccc
agggaccaccgacccccccgccgggaggtaagctggccagcggtcgtttcgtgtctgtctctgtcttt
gtgcgtgtttgtgccggcatctaatgtttgcgcctgcgtctgtactagttagctaactagctctgtat
ctggcggacccgtggtggaactgacgagttctgaacacccggccgcaaccctgggagacgtcccaggg
actttgggggccgtttttgtggcccgacctgaggaagggagtcgatgtggaatccgaccccgtcagga
tatgtggttctggtaggagacgagaacctaaaacagttcccgcctccgtctgaatttttgctttcggt
ttggaaccgaagccgcgcgtcttgtctgctgcagcgctgcagcatcgttctgtgttgtctctgtctga
ctgtgtttctgtatttgtctgaaaattagggccagactgttaccactcccttaagtttgaccttaggt
cactggaaagatgtcgagcggatcgctcacaaccagtcggtagatgtcaagaagagacgttgggttac
cttctgctctgcagaatggccaacctttaacgtcggatggccgcgagacggcacctttaaccgagacc
tcatcacccaggttaagatcaaggtcttttcacctggcccgcatggacacccagaccaggtcccctac
atcgtgacctgggaagccttggcttttgacccccctccctgggtcaagccctttgtacaccctaagcc
tccgcctcctcttcctccatccgccccgtctctcccccttgaacctcctcgttcgaccccgcctcgat
cctccctttatccagccctcactccttctctaggcgccggaattagatctctcgagatcgatgccttg
agacaaatggcagtattcatccacaattttaaaagaaaaggggggattggggggtacagtgcagggga
aagaatagtagacataatagcaacagacatacaaactaaagaattacaaaaacaaattacaaaaattc
aaaattttcgggtttattacagggacagcagagatccactttggcgccggctcgagggggccGCTCCG
GTGCCCGTCAGTGGGCAGAGCGCACATCGCCCACAGTCCCCGAGAAGTTGGGGGGAGGGGTCGGCAAT
TGAACCGGTGCCTAGAGAAGGTGGCGCGGGGTAAACTGGGAAAGTGATGTCGTGTACTGGCTCCGCCT
TTTTCCCGAGGGTGGGGGAGAACCGTATATAAGTGCAGTAGTCGCCGTGAACGTTCTTTTTCGCAACG
GGTTTGCCGCCAGAACACAGGTAAGTGCCGTGTGTGGTTCCCGCGGGCCTGGCCTCTTTACGGGTTAT
GGCCCTTGCGTGCCTTGAATTACTTCCACGCCCCTGGCTGCAGTACGTGATTCTTGATCCCGAGCTTC
GGGTTGGAAGTGGGTGGGAGAGTTCGAGGCCTTGCGCTTAAGGAGCCCCTTCGCCTCGTGCTTGAGTT
GAGGCCTGGCTTGGGCGCTGGGGCCGCCGCGTGCGAATCTGGTGGCACCTTCGCGCCTGTCTCGCTGC
TTTCGATAAGTCTCTAGCCATTTAAAATTTTTGATGACCTGCTGCGACGCTTTTTTTCTGGCAAGATA
GTCTTGTAAATGCGGGCCAAGATCTGCACACTGGTATTTCGGTTTTTGGGGCCGCGGGCGGCGACGGG
GCCCGTGCGTCCCAGCGCACATGTTCGGCGAGGCGGGGCCTGCGAGCGCGGCCACCGAGAATCGGACG
GGGGTAGTCTCAAGCTGGCCGGCCTGCTCTGGTGCCTGGCCTCGCGCCGCCGTGTATCGCCCCGCCCT
GGGCGGCAAGGCTGGCCCGGTCGGCACCAGTTGCGTGAGCGGAAAGATGGCCGCTTCCCGGCCCTGCT
GCAGGGAGCTCAAAATGGAGGACGCGGCGCTCGGGAGAGCGGGCGGGTGAGTCACCCACACAAAGGAA
AAGGGCCTTTCCGTCCTCAGCCGTCGCTTCATGTGACTCCACGGAGTACCGGGCGCCGTCCAGGCACC
TCGATTAGTTCTCGAGCTTTTGGAGTACGTCGTCTTTAGGTTGGGGGGAGGGGTTTTATGCGATGGAG
TTTCCCCACACTGAGTGGGTGGAGACTGAAGTTAGGCCAGCTTGGCACTTGATGTAATTCTCCTTGGA
ATTTGCCCTTTTTGAGTTTGGATCTTGGTTCATTCTCAAGCCTCAGACAGTGGTTCAAAGTTTTTTTC
TTCCATTTCAGGTGTCGTGAGGATCTATTTCCGGTGAATTCGCCGCCACCATGAGCGATAACGGCCCC
CAAAACCAACGGAATGCCCCTCGGATAACATTTGGTGGCCCTAGTGATTCCACAGGAAGTAACCAAAA
CGGAGAACGGTCTGGAGCCCGCTCTAAACAGAGGCGACCACAGGGATTGCCAAATAACACAGCGTCAT
GGTTTACAGCCCTGACTCAACATGGAAAGGAGGACTTGAAATTTCCACGAGGACAGGGTGTACCAATA
AACACAAACAGTAGTCCAGACGATCAGATCGGGTATTATAGAAGGGCCACGAGACGCATCAGAGGTGG
AGATGGTAAAATGAAAGATCTCAGTCCGCGCTGGTACTTTTATTATTTGGGAACCGGCCCAGAAGCGG
GCCTCCCATATGGAGCCAATAAGGACGGGATTATATGGGTGGCTACAGAGGGAGCCCTCAATACGCCA
AAAGATCACATCGGAACAAGAAACCCTGCTAATAATGCCGCAATCGTGCTGCAGTTGCCTCAGGGGAC
GACGCTTCCTAAAGGCTTTTACGCAGAAGGATCACGCGGCGGCAGCCAAGCATCCTCAAGGTCTAGTT
CCAGAAGTCGAAACAGCTCCAGAAACTCCACACCAGGGTCCAGTAGGGGCACAAGTCCGGCGCGGATG
GCGGGCAACGGCGGAGACGCCGCACTCGCTCTGTTGCTCCTGGACCGGCTCAACCAACTTGAATCCAA
GATGAGTGGTAAGGGACAGCAGCAACAAGGTCAAACCGTAACCAAGAAAAGCGCTGCAGAAGCTTCTA
AAAAACCTCGACAAAAACGGACCGCTACGAAGGCATATAACGTTACTCAAGCCTTCGGGAGACGAGGG
CCGGAGCAAACCCAGGGGAATTTTGGAGATCAGGAGCTCATCCGGCAAGGGACAGATTACAAACATTG
GCCTCAAATCGCTCAGTTCGCGCCGTCCGCAAGTGCTTTTTTCGGAATGTCTCGCATCGGTATGGAAG
TAACACCATCCGGGACATGGCTCACTTATACCGGCGCCATCAAGCTGGACGACAAAGATCCAAATTTC
AAAGATCAGGTGATTCTCTTGAATAAACACATAGACGCGTATAAGACGTTTCCACCCACCGAACCCAA
GAAGGACAAAAAGAAAAAAGCTGATGAAACACAAGCGTTGCCCCAGCGACAGAAGAAGCAGCAAACCG
TCACCCTCCTGCCAGCCGCTGATCTCGATGACTTCTCCAAGCAACTTCAACAGTCCATGAGCTCAGCC
GATTCTACTCAGGCGggatccggcgcaacaaacttctctctgctgaaacaagccggagatgtcgaaga
gaatcctggaccgatgagtaaaggagaagctgtgattaaagagttcatgcgcttcaaagttcacatgg
agggttctatgaacggtcacgagttcgagatcgaaggcgaaggcgagggccgtccgtatgaaggcacc
cagaccgccaaactgaaagtgactaaaggcggcccgctgcctttttcctgggacatcctgagcccgca
atttatgtacggttctagggcgttcaccaaacacccagcggatatcccggactattataagcagtctt
ttccggaaggtttcaagtgggaacgcgtaatgaattttgaagatggtggtgccgtgaccgtcactcag
gacacctccctggaggatggcaccctgatctataaagttaaactgcgtggtactaattttccacctga
tggcccggtgatgcagaaaaagacgatgggttgggaggcgtctaccgaacgcttgtatccggaagatg
gtgtgctgaaaggcgacattaaaatggccctgcgcctgaaagatggcggccgctatctggctgacttc
aaaaccacgtacaaagccaagaaacctgtgcagatgcctggcgcgtacaatgtggaccgcaaactgga
catcacctctcataatgaagattatacggtggtagagcaatatgagcgctccgagggtcgtcattcta
ccggtggcatggatgaactatacaaataagaattcagcgctaataaaagatctttattttcattagat
ctgtgtgttggttttttgtgtcgataaaataaaagattttatttagtctccagaaaaaggggggaatg
aaagaccccacctgtaggtttggcaagctagcttaagtaacgccattttgcaaggcatggaaaataca
taactgagaatagagaagttcagatcaaggttaggaacagagagacagcagaatatgggccaaacagg
atatctgtggtaagcagttcctgccccggctcagggccaagaacagatggtccccagatgcggtcccg
ccctcagcagtttctagagaaccatcagatgtttccagggtgccccaaggacctgaaatgaccctgtg
ccttatttgaactaaccaatcagttcgcttctcgcttctgttcgcgcgcttctgctccccgagctcaa
taaaagagcccacaacccctcactcggcgcgccagtcctccgatagactgcgtcgcccgggtacccgt
gtatccaataaaccctcttgcagttgcatccgacttgtggtctcgctgttccttgggagggtctcctc
tgagtgattgactacccgtcagcgggggtctttcatgggtaacagtttcttgaagttggagaacaaca
ttctgagggtaggagtcgaatattaagtaatcctgactcaattagccactgttttgaatccacatact
ccaatactcctgaaatagttcattatggacagcgcagaaagagctggggagaattgtgaaattgttat
ccgctcacaattccacacaacatacgagccggaagcataaagtgtaaagcctggggtgcctaatgagt
gagctaactcacattaattgcgttgcgctcactgcccgctttccagtcgggaaacctgtcgtgccagc
tgcattaatgaatcggccaacgcgcggggagaggcggtttgcgtattgggcgctcttccgcttcctcg
ctcactgactcgctgcgctcggtcgttcggctgcggcgagcggtatcagctcactcaaaggcggtaat
acggttatccacagaatcaggggataacgcaggaaagaacatgtgagcaaaaggccagcaaaaggcca
ggaaccgtaaaaaggccgcgttgctggcgtttttccataggctccgcccccctgacgagcatcacaaa
aatcgacgctcaagtcagaggtggcgaaacccgacaggactataaagataccaggcgtttccccctgg
aagctccctcgtgcgctctcctgttccgaccctgccgcttaccggatacctgtccgcctttctccctt
cgggaagcgtggcgctttctcatagctcacgctgtaggtatctcagttcggtgtaggtcgttcgctcc
aagctgggctgtgtgcacgaaccccccgttcagcccgaccgctgcgccttatccggtaactatcgtct
tgagtccaacccggtaagacacgacttatcgccactggcagcagccactggtaacaggattagcagag
cgaggtatgtaggcggtgctacagagttcttgaagtggtggcctaactacggctacactagaagaaca
gtatttggtatctgcgctctgctgaagccagttaccttcggaaaaagagttggtagctcttgatccgg
caaacaaaccaccgctggtagcggtggtttttttgtttgcaagcagcagattacgcgcagaaaaaaag
gatctcaagaagatcctttgatcttttctacggggtctgacgctcagtggaacgaaaactcacgttaa
gggattttggtcatgagattatcaaaaaggatcttcacctagatccttttaaattaaaaatgaagttt
taaatcaatctaaagtatatatgagtaaacttggtctgacagttaccaatgcttaatcagtgaggcac
ctatctcagcgatctgtctatttcgttcatccatagttgcctgactccccgtcgtgtagataactacg
atacgggagggcttaccatctggccccagtgctgcaatgataccgcgagacccacgctcaccggctcc
agatttatcagcaataaaccagccagccggaagggccgagcgcagaagtggtcctgcaactttatccg
cctccatccagtctattaattgttgccgggaagctagagtaagtagttcgccagttaatagtttgcgc
aacgttgttgccattgctacaggcatcgtggtgtcacgctcgtcgtttggtatggcttcattcagctc
cggttcccaacgatcaaggcgagttacatgatcccccatgttgtgcaaaaaagcggttagctccttcg
gtcctccgatcgttgtcagaagtaagttggccgcagtgttatcactcatggttatggcagcactgcat
aattctcttactgtcatgccatccgtaagatgcttttctgtgactggtgagtactcaaccaagtcatt
ctgagaatagtgtatgcggcgaccgagttgctcttgcccggcgtcaatacgggataataccgcgccac
atagcagaactttaaaagtgctcatcattggaaaacgttcttcggggcgaaaactctcaaggatctta
ccgctgttgagatccagttcgatgtaacccactcgtgcacccaactgatcttcagcatcttttacttt
caccagcgtttctgggtgagcaaaaacaggaaggcaaaatgccgcaaaaaagggaataagggcgacac
ggaaatgttgaatactcatactcttcctttttcaatattattgaagcatttatcagggttattgtctc
atgagcggatacatatttgaatgtatttagaaaaataaacaaataggggttccgcgcacatttccccg
aaaagtgccacctgacgtctaagaaaccattattatcatgacattaacctataaaaataggcgtatca
cgaggccctttcgtctcgcgcgtttcggtgatgacggtgaaaacctctgacacatgcagctcccggag
acggtcacagcttgtctgtaagcggatgccgggagcagacaagcccgtcagggcgcgtcagcgggtgt
tggcgggtgtcggggctggcttaactatgcggcatcagagcagattgtactgagagtgcaccatatgc
ggtgtgaaataccgcacagatgcgtaaggagaaaataccgcatcaggcgccattcgccattcaggctg
cgcaactgttgggaagggcgatcggtgcgggcctcttcgctattacgccagctggcgaaagggggatg
tgctgcaaggcgattaagttgggtaacgccagggttttcccagtcacgacgttgtaaaacgacggcgc
aaggaatggtgcatgcaaggagatggcgcccaacagtcccccggccacggggcctgccaccataccca
cgccgaaacaagcgctcatgagcccgaagtggcgagcccgatcttccccatcggtgatgtcggcgata
taggcgccagcaaccgcacctgtggcgccggtgatgccggccacgatgcgtccggcgtagaggcgatt
agtccaatttgttaaagacaggatatcagtggtccaggctctagttttgactcaacaatatcaccagc
tgaagcctatagagtacgagccatagataaaataaaagattttatttagtctccagaaaaagggggga
atgaaa

### Enumerated Embodiments

[0434] The following enumerated embodiments are provided, the numbering of which is not to be construed as designating levels of importance.

[0435] Embodiment 1 provides an isolated messenger ribonucleic acid (mRNA) comprising a 5′ untranslated region (UTR), a 3′ UTR, and an open reading frame encoding a spike protein sequence, wherein the spike protein sequence comprises all or a portion of a coronavirus spike protein, further wherein the spike protein sequence comprises one or more mutations that stabilize the spike protein in a prefusion conformation.

[0436] Embodiment 2 provides the isolated mRNA of Embodiment 1, wherein the coronavirus is a variant of a coronavirus selected from the group consisting of SARS-CoV-2, MERS, and SARS-CoV.

[0437] Embodiment 3 provides the isolated mRNA of Embodiment 2, wherein the variant is selected from SARS-CoV-2 B.1.1.7 (Alpha variant), SARS-CoV-2 B.1.351 (Beta variant), SARS-CoV-2 B.1.617, SARS-CoV-2 B.1.617.1 (Kappa variant), SARS-CoV-2 B.1.617.2 (Delta variant), SARS-CoV-2 B.1.617.3, SARS-CoV-2 B.1.1.529/BA.1 (Omicron variant), SARS-CoV-2 BA.5, SARS-CoV-2 BA.2, SARS-CoV-2 BA.2.12.1, and SARS-CoV-2 BA.4/5.

[0438] Embodiment 4 provides the isolated mRNA of any one of Embodiments 1-3, wherein the spike protein sequence comprises all or a portion of the S2 subunit of the spike protein, wherein the one or more mutations comprise one or more proline substitutions in the S2 subunit.

[0439] Embodiment 5 provides the isolated mRNA of Embodiment 4, wherein the one or more proline substitutions are selected from the group consisting of F817P, A892P, A899P, A942P, K986P, V987P, and combinations thereof, wherein the amino acid positions of the proline substitutions are relative to the native SARS-CoV-2 S sequence set forth in SEQ ID NO: 2.

[0440] Embodiment 6 provides the isolated mRNA of any one of Embodiments 1-5, wherein the spike protein sequence further comprises an S1/S2 protease cleavage site of the spike protein, wherein the cleavage site comprises one or more mutations to inhibit protease cleavage of the spike protein.

[0441] Embodiment 7 provides the isolated mRNA of Embodiment 6, wherein the cleavage site is a furin cleavage site, optionally wherein the furin cleavage site is deleted or replaced with the sequence GSAS (SEQ ID NO:11).

[0442] Embodiment 8 provides the isolated mRNA of any one of Embodiments 1-7, wherein the spike protein sequence comprises the amino acid sequence of any one of SEQ ID NOs: 2-10, 34, 46-54, and 57-60, and/or an amino acid sequence having 75%, 80%, 85%, 90%, 91%, 92%, 93%, 94%, 95%, 96%, 97%, 98%, 99%, 99.5% or more sequence identity to any one of SEQ ID NOs: 2-10, 34, 46-54, and 57-60.

[0443] Embodiment 9 provides an isolated, chimeric messenger ribonucleic acid (mRNA) comprising a 5′ UTR, a 3′ UTR, and two or more open reading frames, wherein each open reading frame encodes a different spike protein sequence, wherein each spike protein sequence comprises a spike protein subunit from the spike protein of a distinct coronavirus species or variant thereof.

[0444] Embodiment 10 provides the isolated mRNA of Embodiment 9, wherein the two or more open reading frames comprise a first open reading frame and a second open reading frame, wherein the first open reading frame encodes an S1 subunit of a first coronavirus selected from SARS-CoV, MERS-CoV, and SARS-CoV-2, and wherein the second open reading frame encodes an S2 subunit of a second coronavirus selected from SARS-CoV, MERS-CoV, and SARS-CoV-2.

[0445] Embodiment 11 provides the isolated mRNA of Embodiment 10, wherein at least one applies:
[0446] (a) the S1 subunit is from SARS-CoV-2 B.1.351 and the S2 subunit is from SARS-CoV-2 B.1.617, such as but not limited to B.1.617.2;
[0447] (b) the S1 subunit is from SARS-CoV and the S2 subunit is from SARS-CoV-2 B.1.617, such as but not limited to B.1.617.2; or
[0448] (c) the S1 subunit is from MERS-CoV and the S2 subunit is from SARS-CoV-2 B.1.617, such as but not limited to B.1.617.2.

[0449] Embodiment 12 provides the isolated mRNA of Embodiment 10 or 11, wherein the S2 subunit comprises one or more mutations that stabilize the spike protein in a prefusion conformation, optionally wherein the one or more mutations are selected from the group consisting of F817P, A892P, A899P, A942P, K986P, V987P, and combinations thereof.

[0450] Embodiment 13 provides the isolated mRNA of any one of Embodiments 10-12, wherein there is no linker or other domain intervening between the first and second open reading frames.

[0451] Embodiment 14 provides the isolated mRNA of Embodiment 9, wherein each open reading frame further comprises a sequence encoding a SPY tag, wherein the SPY tag is positioned at the C-terminus of the spike protein subunit.

[0452] Embodiment 15 provides the isolated mRNA of Embodiment 14, further comprising a sequence encoding a 2A self-cleaving peptide between adjacent open reading frames.

[0453] Embodiment 16 provides the isolated mRNA of Embodiment 15, wherein the two or more open reading frames comprise a first open reading frame, a second open reading frame, and optionally a third open reading frame, wherein:
[0454] (a) the first open reading frame encodes an S1 subunit of a SARS-CoV-2 variant, in certain non-limiting embodiments SARS-CoV-2 B.1.351;
[0455] (b) the second open reading frame encodes an S1 subunit of SARS-CoV; and
[0456] (c) the third open reading frame encodes an S1 subunit of MERS-CoV.

[0457] Embodiment 17 provides an isolated messenger ribonucleic acid (mRNA) comprising a 5′ UTR, a 3′ UTR, and an open reading frame, wherein the open readying frame encodes an S2 subunit of a coronavirus spike protein and a SPY catcher, wherein the SPY catcher is positioned at the N-terminus of the spike protein S2 subunit, optionally wherein the coronavirus is selected from SARS-CoV, MERS-CoV, SARS-CoV-2, and variants thereof.

[0458] Embodiment 18 provides the isolated mRNA of any one of Embodiments 1-17, wherein the mRNA further comprises a 5′ cap, a poly(A) tail, one or more modified nucleotides, one or more structural modifications, or a combination thereof.

[0459] Embodiment 19 provides the isolated mRNA of Embodiment 18, wherein the one or more modified nucleotides are independently selected from pseudouridine, N1-methyl-pseudouridine, N1-Methylpseudouridine-5′-Triphosphate-(N-1081), 1-ethylpseudouridine, 2-thiouridine, 4′-thiouridine, 5-methoxyuridine, 5-methoxyuridine, N6-methyladenosine, and 5-methylcytosine.

[0460] Embodiment 20 provides the isolated mRNA of Embodiment 18 or 19, wherein the 5′ cap is cap0, cap1, cap 2, ARCA, beta-S-ARCA, m7G, inosine, N1-methyl-guanosine, 2′-fluoro-guanosine, 7-deaza-guanosine, 8-oxo-guanosine, 2-amino-guanosine, LNA-guanosine, tri-methylgranosine (TMG), nicotinamide adenine dinucleotide (NAD), cap AG, cap AU, cap GG, or 2-azido-guanosine.

[0461] Embodiment 21 provides the isolated mRNA of any one of Embodiments 1-20, wherein the mRNA is codon optimized for expression in a eukaryotic cell.

[0462] Embodiment 22 provides the isolated mRNA of any one of Embodiments 1-21, wherein the mRNA is produced by in vitro transcription.

[0463] Embodiment 23 provides an isolated polynucleotide encoding the mRNA of any one of Embodiments 1-22, optionally wherein the polynucleotide comprises one or more promoters and/or a polyadenylation signal operably linked to a sequence encoding the mRNA.

[0464] Embodiment 24 provides a vector comprising the polynucleotide of Embodiment 23.

[0465] Embodiment 25 provides the vector of Embodiment 24, wherein the vector is a viral vector, optionally an adeno-associated virus (AAV) vector, optionally AAV9.

[0466] Embodiment 26 provides a method of producing a recombinant coronavirus spike protein stabilized in a prefusion conformation, the method comprising introducing the polynucleotide of Embodiment 23 or vector of Embodiment 24 or 25 to a host cell and incubating the host cell under conditions sufficient for expression of the polynucleotide, thereby producing the recombinant spike protein, wherein the polynucleotide encodes the mRNA of any one of Embodiments 1-8.

[0467] Embodiment 27 provides a method of producing a chimeric/hybrid coronavirus spike protein, the method comprising introducing the polynucleotide of Embodiment 23 or vector of Embodiment 24 or 25 to a host cell and incubating the host cell under conditions sufficient for expression of the polynucleotide, thereby producing the chimeric/hybrid spike protein, wherein the polynucleotide encodes the mRNA of any one of Embodiments 9-17.

[0468] Embodiment 28 provides the method of Embodiment 26 or 27, further comprising purifying the spike protein from the cell.

[0469] Embodiment 29 provides a virus-like particle comprising the protein encoded by the mRNA of any one of Embodiments 1-22.

[0470] Embodiment 30 provides a lipid nanoparticle comprising the mRNA of any one of Embodiments 1-22.

[0471] Embodiment 31 provides a lipid nanoparticle comprising two or more distinct mRNAs, wherein each mRNA comprises an open reading frame encoding all or a portion of a coronavirus spike protein derived from a distinct coronavirus species or variant thereof.

[0472] Embodiment 32 provides the lipid nanoparticle of Embodiment 31 comprising three mRNAs, wherein the spike protein or portion thereof is selected from MERS-CoV, SARS-CoV, SARS-CoV-2, and variants thereof.

[0473] Embodiment 33 provides the lipid nanoparticle of any one of Embodiments 30-32, wherein the molar ratio of lipid to mRNA is in the range of about 5:1 to 20:1, preferably 6:1.

[0474] Embodiment 34 provides the lipid nanoparticle of any one of Embodiments 30-33, wherein the lipid nanoparticle comprises at least one ionizable cationic lipid, at least one helper lipid, at least one sterol, and at least one PEG-modified lipid.

[0475] Embodiment 35 provides the lipid nanoparticle of Embodiment 34, wherein the at least one ionizable cationic lipid comprises 1,2-dimyristoyl-sn-glycero-3-ethylphosphocholine (DMEPC), 1,2-di-O-octadecenyl-3-trimethylammonium propane (DOTMA), 1,2-dioleoyl-3-trimethylammonium propane (DOTAP), PNI ionizable lipid, SM-102, DLin-MC3-DMA, DLin-KC2-DMA, ALC-0315, or a combination thereof.

[0476] Embodiment 36 provides the lipid nanoparticle of Embodiment 34 or 35, wherein the at least one helper lipid comprises 1,2-distearoyl-sn-glycero-3-phosphocholine (DSPC), 1,2-di-(9Z-octadecenoyl)-sn-glycero-3-phosphoethanolamine (DOPE), 1-palmitoyl-2-oleoyl-sn-glycero-3-phosphocholin (POPC), 1,2-dioleoyl-sn-glycero-3-phosphocholine (DOPC), or a combination thereof.

[0477] Embodiment 37 provides the lipid nanoparticle of any one of Embodiments 34-36, wherein the at least one PEG-modified lipid comprises 1,2-dimyristoyl-racglycero-3-methoxypolyethylene glycol-2000 (PEG-DMG), 1,2-Distearoyl-sn-glycerol, methoxypolyethylene glycol (PEG-DSG), 1,2-Dipalmitoyl-sn-glycerol, methoxypolyethylene glycol (PEG-DPG), mPEG-OH, mPEG-AA (mPEG-CM), mPEG-CH₂CH₂CH₂—NH₂, MPEG-DMG, mPEG-N,N-Ditetradecylacetamide (ALC-0159), mPEG-DSPE, mPEG-DPPE, or a combination thereof.

[0478] Embodiment 38 provides the lipid nanoparticle of any one of Embodiments 34-37, wherein the at least one sterol is cholesterol.

[0479] Embodiment 39 provides the lipid nanoparticle of any one of Embodiments 34-38, wherein the lipid nanoparticle comprises about 20-60% ionizable cationic lipid, about 5-25% helper lipid, about 25-55% sterol, and about 0.5-15% PEG-modified lipid.

[0480] Embodiment 40 provides a pharmaceutical composition comprising the lipid nanoparticle of any one of Embodiments 30-39 and a pharmaceutically acceptable carrier or excipient.

[0481] Embodiment 41 provides a vaccine comprising one or more lipid nanoparticles of any one of Embodiments 30-39 or the pharmaceutical composition of Embodiment 40, and further comprising a pharmaceutically acceptable adjuvant.

[0482] Embodiment 42 provides a method of inducing in a subject an immune response to a coronavirus, comprising administering to the subject the vaccine of Embodiment 41 in an amount effective to generate the immune response.

[0483] Embodiment 43 provides the method of Embodiment 42, wherein the immune response comprises a T cell response and/or a B cell response.

[0484] Embodiment 44 provides the method of Embodiment 43, wherein the immune response comprises a neutralizing antibody response specific to the coronavirus spike protein.

[0485] Embodiment 45 provides the method of any one of Embodiments 42-44, wherein the immune response inhibits infection by the coronavirus and/or replication of the coronavirus in the subject.

[0486] Embodiment 46 provides the method of any one of Embodiments 42-45, wherein the subject is administered a single dose of the vaccine.

[0487] Embodiment 47 provides the method of any one of Embodiments 42-45, wherein the subject is administered two or more doses of the vaccine, optionally wherein the two or more doses are administered 14-28 days apart.

[0488] Embodiment 48 provides the method of Embodiment 47, wherein each administration of the vaccine comprises a dose of about 1 μg, 3 μg, 10 μg, 25 μg, 30 μg or 100 μg.

[0489] Embodiment 49 provides the method of any one of Embodiments 42-48, wherein the effective amount is a total dose of about 1-500 μg, inclusive.

[0490] Embodiment 50 provides the method of any one of Embodiments 42-49, wherein the vaccine is administered by intradermal injection, intramuscular injection, oral administration, intranasal administration, or intratracheal administration.

[0491] Embodiment 51 provides the method of any one of Embodiments 42-50, wherein the subject has been exposed to, is infected with, or is at risk of infection by the coronavirus.

[0492] Embodiment 52 provides the method of any one of Embodiments 42-51, wherein the subject is immunocompromised.

[0493] Embodiment 53 provides the method of any one of Embodiments 42-52, wherein the subject is human.

[0494] Embodiment 54 provides the method of any one of Embodiments 42-53, wherein the coronavirus is selected from MERS-CoV, SARS-CoV, SARS-CoV-2, and variants thereof.

### OTHER EMBODIMENTS

[0495] It is understood that the disclosed method and compositions are not limited to the particular methodology, protocols, and reagents described as these may vary. It is also to be understood that the terminology used herein is for the purpose of describing particular embodiments only, and is not intended to limit the scope of the present disclosure which will be limited only by the appended claims.

[0496] Those skilled in the art will recognize, or be able to ascertain using no more than routine experimentation, many equivalents to the specific embodiments of the method and compositions described herein. Such equivalents are intended to be encompassed by the following claims.

1. An isolated messenger ribonucleic acid (mRNA) comprising a 5′ untranslated region (UTR), a 3′ UTR, and an open reading frame encoding a spike protein sequence,
wherein the spike protein sequence comprises all or a portion of a coronavirus spike protein,
further wherein the spike protein sequence comprises one or more mutations that stabilize the spike protein in a prefusion conformation.

2. The isolated mRNA of claim 1, wherein the coronavirus is a variant of a coronavirus selected from the group consisting of SARS-CoV-2, MERS, and SARS-CoV,
optionally wherein the variant is selected from SARS-CoV-2 B.1.1.7 (Alpha variant), SARS-CoV-2 B.1.351 (Beta variant), SARS-CoV-2 B.1.617, SARS-CoV-2 B.1.617.1 (Kappa variant), SARS-CoV-2 B.1.617.2 (Delta variant), SARS-CoV-2 B.1.617.3, SARS-CoV-2 B.1.1.529/BA.1 (Omicron variant), SARS-CoV-2 BA.5, SARS-CoV-2 BA.2, SARS-CoV-2 BA.2.12.1, and SARS-CoV-2 BA.4/5.

3. (canceled)

4. The isolated mRNA of claim 1, wherein the spike protein sequence comprises all or a portion of the S2 subunit of the spike protein, wherein the one or more mutations comprise one or more proline substitutions in the S2 subunit,
optionally wherein the one or more proline substitutions are selected from the group consisting of F817P, A892P, A899P, A942P, K986P, V987P, and combinations thereof, wherein the amino acid positions of the proline substitutions are relative to the native SARS-CoV-2 S sequence set forth in SEQ ID NO:2.

5. (canceled)

6. The isolated mRNA of claim 1, wherein the spike protein sequence further comprises an S1/S2 protease cleavage site of the spike protein, wherein the cleavage site comprises one or more mutations to inhibit protease cleavage of the spike protein,
optionally wherein the cleavage site is a furin cleavage site, optionally wherein the furin cleavage site is deleted or replaced with the sequence GSAS (SEQ ID NO:11).

7. (canceled)

8. The isolated mRNA of claim 1, wherein the spike protein sequence comprises the amino acid sequence of any one of SEQ ID NOs: 2-10, 34, 46-54, and 57-60, or an amino acid sequence having 75%, 80%, 85%, 90%, 91%, 92%, 93%, 94%, 95%, 96%, 97%, 98%, 99%, 99.5% or more sequence identity to any one of SEQ ID NOs: 2-10, 34, 46-54, and 57-60.

9. An isolated, chimeric messenger ribonucleic acid (mRNA) comprising a 5′ UTR, a 3′ UTR, and two or more open reading frames,
wherein each open reading frame encodes a different spike protein sequence,
wherein each spike protein sequence comprises a spike protein subunit from the spike protein of a distinct coronavirus species or variant thereof.

10. The isolated mRNA of claim 9, wherein the two or more open reading frames comprise a first open reading frame and a second open reading frame,
wherein the first open reading frame encodes an S1 subunit of a first coronavirus selected from SARS-CoV, MERS-CoV, and SARS-CoV-2, and
wherein the second open reading frame encodes an S2 subunit of a second coronavirus selected from SARS-CoV, MERS-CoV, and SARS-CoV-2,
optionally wherein one of the following applies:
(a) the S1 subunit is from SARS-CoV-2 B.1.351 and
the S2 subunit is from SARS-CoV-2 B.1.617;
(b) the S1 subunit is from SARS-CoV and
the S2 subunit is from SARS-CoV-2 B.1.617; or
the S1 subunit is from MERS-CoV and (c)
the S2 subunit is from SARS-CoV-2 B.1.617.

11. (canceled)

12. The isolated mRNA of claim 10, wherein the S2 subunit comprises one or more mutations that stabilize the spike protein in a prefusion conformation, optionally wherein the one or more mutations are selected from the group consisting of F817P, A892P, A899P, A942P, K986P, V987P, and combinations thereof.

13. The isolated mRNA of claim 10, wherein there is no linker or other domain intervening between the first and second open reading frames.

14. The isolated mRNA of claim 9, wherein each open reading frame further comprises a sequence encoding a SPY tag, wherein the SPY tag is positioned at the C-terminus of the spike protein subunit.

15. The isolated mRNA of claim 14, further comprising a sequence encoding a 2A self-cleaving peptide between adjacent open reading frames,
optionally wherein the two or more open reading frames comprise a first open reading frame, a second open reading frame, and optionally a third open reading frame, wherein:
(a) the first open reading frame encodes an S1 subunit of a SARS-CoV-2 variant optionally SARS-CoV-2 B.1.351;
(b) the second open reading frame encodes an S1 subunit of SARS-CoV; and
(c) the third open reading frame encodes an S1 subunit of MERS-CoV.

16. (canceled)

17. An isolated messenger ribonucleic acid (mRNA) comprising a 5′ UTR, a 3′ UTR, and an open reading frame,
wherein the open readying frame encodes an S2 subunit of a coronavirus spike protein and a SPY catcher,
wherein the SPY catcher is positioned at the N-terminus of the spike protein S2 subunit,
optionally wherein the coronavirus is selected from SARS-CoV, MERS-CoV, SARS-CoV-2, and variants thereof.

18. The isolated mRNA of claim 1, wherein the mRNA further comprises a 5′ cap, a poly(A) tail, one or more modified nucleotides, one or more structural modifications, or a combination thereof,
optionally wherein one of the following applies:
(a) the one or more modified nucleotides are independently selected from pseudouridine, N1-methyl-pseudouridine, N1-Methylpseudouridine-5′-Triphosphate-(N-1081), 1-ethylpseudouridine, 2-thiouridine, 4′-thiouridine, 5-methoxyuridine, 5-methoxyuridine, N6-methyladenosine, and 5-methylcytosine;
(b) the 5′ cap is cap0, cap1, cap 2, ARCA, beta-S-ARCA, m7G, inosine, N1-methyl-guanosine, 2′-fluoro-guanosine, 7-deaza-guanosine, 8-oxo-guanosine, 2-amino-guanosine, LNA-guanosine, tri-methylgranosine (TMG), nicotinamide adenine dinucleotide (NAD), cap AG, cap AU, cap GG, or 2-azido-guanosine.

19-20. (canceled)

21. The isolated mRNA of claim 1, wherein at least one of the following applies:
(a) the mRNA is codon optimized for expression in a eukaryotic cell;
(b) the mRNA is produced by in vitro transcription.

22. (canceled)

23. An isolated polynucleotide encoding the mRNA of claim 1, optionally wherein the polynucleotide comprises one or more promoters and/or a polyadenylation signal operably linked to a sequence encoding the mRNA.

24. A vector comprising the polynucleotide of claim 23, optionally wherein the vector is a viral vector, optionally an adeno-associated virus (AAV) vector.

25. (canceled)

26. A method of producing a recombinant coronavirus spike protein stabilized in a prefusion conformation, the method comprising introducing the polynucleotide of claim 23 to a host cell and incubating the host cell under conditions sufficient for expression of the polynucleotide, thereby producing the recombinant spike protein,
wherein the polynucleotide encodes an isolated messenger ribonucleic acid (mRNA) comprising a 5′ untranslated region (UTR), a 3′ UTR, and an open reading frame encoding a spike protein sequence,
wherein the spike protein sequence comprises all or a portion of a coronavirus spike protein,
further wherein the spike protein sequence comprises one or more mutations that stabilize the spike protein in a prefusion conformation
optionally wherein the polynucleotide is comprised within a vector;
optionally wherein the spike protein is further purified from the cell.

27. A method of producing a chimeric/hybrid coronavirus spike protein, the method comprising introducing the polynucleotide of claim 23 to a host cell and incubating the host cell under conditions sufficient for expression of the polynucleotide, thereby producing the chimeric/hybrid spike protein,
wherein the polynucleotide encodes an isolated, chimeric messenger ribonucleic acid (mRNA) comprising a 5′ UTR, a 3′ UTR, and two or more open reading frames,
wherein each open reading frame encodes a different spike protein sequence,
wherein each spike protein sequence comprises a spike protein subunit from the spike protein of a distinct coronavirus species or variant thereof,
optionally wherein the polynucleotide is comprised within a vector;
optionally wherein the spike protein is further purified from the cell.

28. (canceled)

29. A virus-like particle comprising the protein encoded by the mRNA of claim 1.

30. A lipid nanoparticle comprising the mRNA of claim 1.

31. A lipid nanoparticle comprising two or more distinct mRNAs, wherein each mRNA comprises an open reading frame encoding all or a portion of a coronavirus spike protein derived from a distinct coronavirus species or variant thereof.

32. The lipid nanoparticle of claim 31 comprising three mRNAs, wherein the spike protein or portion thereof is selected from MERS-CoV, SARS-CoV, SARS-CoV-2, and variants thereof.

33. The lipid nanoparticle of claim 30, wherein at least one of the following applies:
(a) the molar ratio of lipid to mRNA is in the range of about 5:1 to 20:1, preferably 6:1;
(b) the lipid nanoparticle comprises at least one ionizable cationic lipid, at least one helper lipid, at least one sterol, and at least one PEG-modified lipid.

34. (canceled)

35. The lipid nanoparticle of claim 33, wherein at least one of the following applies:
(a) the at least one ionizable cationic lipid comprises 1,2-dimyristoyl-sn-glycero-3-ethylphosphocholine (DMEPC), 1,2-di-O-octadecenyl-3-trimethylammonium propane (DOTMA), 1,2-dioleoyl-3-trimethylammonium propane (DOTAP), PNI ionizable lipid, SM-102, DLin-MC3-DMA, DLin-KC2-DMA, ALC-0315, or a combination thereof;
(b) the at least one helper lipid comprises 1,2-distearoyl-sn-glycero-3-phosphocholine (DSPC), 1,2-di-(9Z-octadecenoyl)-sn-glycero-3-phosphoethanolamine (DOPE), 1-palmitoyl-2-oleoyl-sn-glycero-3-phosphocholin (POPC), 1,2-dioleoyl-sn-glycero-3-phosphocholine (DOPC), or a combination thereof;
(c) the at least one PEG-modified lipid comprises 1,2-dimyristoyl-racglycero-3-methoxypolyethylene glycol-2000 (PEG-DMG), 1,2-Distearoyl-sn-glycerol, methoxypolyethylene glycol (PEG-DSG), 1,2-Dipalmitoyl-sn-glycerol, methoxypolyethylene glycol (PEG-DPG), mPEG-OH, mPEG-AA (mPEG-CM), mPEG-CH₂CH₂CH₂—NH₂, MPEG-DMG, mPEG-N,N-Ditetradecylacetamide (ALC-0159), mPEG-DSPE, mPEG-DPPE, or a combination thereof;
(d) the at least one sterol is cholesterol;
(e) the lipid nanoparticle comprises about 20-60% ionizable cationic lipid, about 5-25% helper lipid, about 25-55% sterol, and about 0.5-15% PEG-modified lipid.

36-39. (canceled)

40. A pharmaceutical composition comprising the lipid nanoparticle of claim 30 and a pharmaceutically acceptable carrier or excipient.

41. A vaccine comprising one or more lipid nanoparticles of claim 30, and further comprising a pharmaceutically acceptable adjuvant,
optionally wherein the one or more lipid nanoparticles are part of a pharmaceutical composition further comprising a pharmaceutically acceptable carrier or excipient.

42. A method of inducing in a subject an immune response to a coronavirus, comprising administering to the subject the vaccine of claim 41 in an amount effective to generate the immune response.

43. The method of claim 42, wherein at least one the following applies:
(a) the immune response comprises a T cell response and/or a B cell response;
(b) the immune response comprises a neutralizing antibody response specific to the coronavirus spike protein;
(c) the immune response inhibits infection by the coronavirus and/or replication of the coronavirus in the subject;
(d) the subject is administered a single dose of the vaccine;
(e) the subject is administered two or more doses of the vaccine, optionally wherein the two or more doses are administered 14-28 days apart;
(f) each administration of the vaccine comprises a dose of about 1 μg, 3 μg, 10 μg, 25 μg, 30 μg or 100 μg.

44-48. (canceled)

49. The method of claim 42, wherein at least one of the following applies:
(a) the effective amount is a total dose of about 1-500 μg, inclusive;
(b) the vaccine is administered by intradermal injection, intramuscular injection, oral administration, intranasal administration, or intratracheal administration;
(c) the subject has been exposed to, is infected with, or is at risk of infection by the coronavirus;
(d) the subject is immunocompromised;
(e) the subject is human;
(f) the coronavirus is selected from MERS-CoV, SARS-CoV, SARS-CoV-2, and variants thereof.

50-54. (canceled)

The application's sequence listing, which the Patent Office published only in electronic form, follows.

SEQUENCE LISTING (125 sequences)

SEQ ID NO: 1 - DNA, 3822 bp, synthetic construct
  misc_feature 1..3822: note = WT Spike
  source 1..3822: mol_type = other DNA
atgtttgtgttcctggtgctgctgccactggtgtccagccagtgtgtgaacctgaccaccaggacccaacttcctcctgcctacaccaactccttcaccaggggagtctactaccctgacaaggtgttcaggtcctctgtgctgcacagcacccaggacctgttcctgccattcttcagcaatgtgacctggttccatgccatccatgtgtctggcaccaatggcaccaagaggtttgacaaccctgtgctgccattcaatgatggagtctactttgccagcacagagaagagcaacatcatcaggggctggatttttggcaccaccctggacagcaagacccagtccctgctgattgtgaacaatgccaccaatgtggtgattaaggtgtgtgagttccagttctgtaatgacccattcctgggagtctactaccacaagaacaacaagtcctggatggagtctgagttcagggtctactcctctgccaacaactgtacctttgaatatgtgagccaaccattcctgatggacttggagggcaagcagggcaacttcaagaacctgagggagtttgtgttcaagaacattgatggctacttcaagatttacagcaaacacacaccaatcaacctggtgagggacctgccacagggcttctctgccttggaaccactggtggacctgccaattggcatcaacatcaccaggttccagaccctgctggctctgcacaggtcctacctgacacctggagactcctcctctggctggacagcaggagcagcagcctactatgtgggctacctccaaccaaggaccttcctgctgaaatacaatgagaatggcaccatcacagatgctgtggactgtgccctggacccactgtctgagaccaagtgtaccctgaaatccttcacagtggagaagggcatctaccagaccagcaacttcagggtccaaccaacagagagcattgtgaggtttccaaacatcaccaacctgtgtccatttggagaggtgttcaatgccaccaggtttgcctctgtctatgcctggaacaggaagaggattagcaactgtgtggctgactactctgtgctctacaactctgcctccttcagcaccttcaagtgttatggagtgagcccaaccaaactgaatgacctgtgtttcaccaatgtctatgctgactcctttgtgattaggggagatgaggtgagacagattgcccctggacaaacaggcaagattgctgactacaactacaaactgcctgatgacttcacaggctgtgtgattgcctggaacagcaacaacctggacagcaaggtgggaggcaactacaactacctctacagactgttcaggaagagcaacctgaaaccatttgagagggacatcagcacagagatttaccaggctggcagcacaccatgtaatggagtggagggcttcaactgttactttccactccaatcctatggcttccaaccaaccaatggagtgggctaccaaccatacagggtggtggtgctgtcctttgaactgctccatgcccctgccacagtgtgtggaccaaagaagagcaccaacctggtgaagaacaagtgtgtgaacttcaacttcaatggactgacaggcacaggagtgctgacagagagcaacaagaagttcctgccattccaacagtttggcagggacattgctgacaccacagatgctgtgagggacccacagaccttggagattctggacatcacaccatgttcctttggaggagtgtctgtgattacacctggcaccaacaccagcaaccaggtggctgtgctctaccaggatgtgaactgtactgaggtgcctgtggctatccatgctgaccaacttacaccaacctggagggtctacagcacaggcagcaatgtgttccagaccagggctggctgtctgattggagcagagcatgtgaacaactcctatgagtgtgacatcccaattggagcaggcatctgtgcctcctaccagacccagaccaacagcccaaggagggcaaggtctgtggcaagccagagcatcattgcctacacaatgagtctgggagcagagaactctgtggcttacagcaacaacagcattgccatcccaaccaacttcaccatctctgtgaccacagagattctgcctgtgagtatgaccaagacctctgtggactgtacaatgtatatctgtggagacagcacagagtgtagcaacctgctgctccaatatggctccttctgtacccaacttaacagggctctgacaggcattgctgtggaacaggacaagaacacccaggaggtgtttgcccaggtgaagcagatttacaagacacctccaatcaaggactttggaggcttcaacttcagccagattctgcctgacccaagcaagccaagcaagaggtccttcattgaggacctgctgttcaacaaggtgaccctggctgatgctggcttcatcaagcaatatggagactgtctgggagacattgctgccagggacctgatttgtgcccagaagttcaatggactgacagtgctgcctccactgctgacagatgagatgattgcccaatacacctctgccctgctggctggcaccatcacctctggctggacctttggagcaggagcagccctccaaatcccatttgctatgcagatggcttacaggttcaatggcattggagtgacccagaatgtgctctatgagaaccagaaactgattgccaaccagttcaactctgccattggcaagattcaggactccctgtccagcacagcctctgccctgggcaaactccaagatgtggtgaaccagaatgcccaggctctgaacaccctggtgaagcaactttccagcaactttggagccatctcctctgtgctgaatgacatcctgagcagactggacaaggtggaggctgaggtccagattgacagactgattacaggcagactccaatccctccaaacctatgtgacccaacaacttatcagggctgctgagattagggcatctgccaacctggctgccaccaagatgagtgagtgtgtgctgggacaaagcaagagggtggacttctgtggcaagggctaccacctgatgagttttccacagtctgcccctcatggagtggtgttcctgcatgtgacctatgtgcctgcccaggagaagaacttcaccacagcccctgccatctgccatgatggcaaggctcactttccaagggagggagtgtttgtgagcaatggcacccactggtttgtgacccagaggaacttctatgaaccacagattatcaccacagacaacacctttgtgtctggcaactgtgatgtggtgattggcattgtgaacaacacagtctatgacccactccaacctgaactggactccttcaaggaggaactggacaaatacttcaagaaccacaccagccctgatgtggacctgggagacatctctggcatcaatgcctctgtggtgaacatccagaaggagattgacagactgaatgaggtggctaagaacctgaatgagtccctgattgacctccaagaactgggcaaatatgaacaatacatcaagtggccatggtacatctggctgggcttcattgctggactgattgccattgtgatggtgaccataatgctgtgttgtatgacctcctgttgttcctgtctgaaaggctgttgttcctgtggctcctgttgtaagtttgatgaggatgactctgaacctgtgctgaaaggagtgaaactgcactacacctga

SEQ ID NO: 2 - protein, 1273 aa, synthetic construct
  REGION 1..1273: note = WT Spike
MFVFLVLLPLVSSQCVNLTTRTQLPPAYTNSFTRGVYYPDKVFRSSVLHSTQDLFLPFFSNVTWFHAIHVSGTNGTKRFDNPVLPFNDGVYFASTEKSNIIRGWIFGTTLDSKTQSLLIVNNATNVVIKVCEFQFCNDPFLGVYYHKNNKSWMESEFRVYSSANNCTFEYVSQPFLMDLEGKQGNFKNLREFVFKNIDGYFKIYSKHTPINLVRDLPQGFSALEPLVDLPIGINITRFQTLLALHRSYLTPGDSSSGWTAGAAAYYVGYLQPRTFLLKYNENGTITDAVDCALDPLSETKCTLKSFTVEKGIYQTSNFRVQPTESIVRFPNITNLCPFGEVFNATRFASVYAWNRKRISNCVADYSVLYNSASFSTFKCYGVSPTKLNDLCFTNVYADSFVIRGDEVRQIAPGQTGKIADYNYKLPDDFTGCVIAWNSNNLDSKVGGNYNYLYRLFRKSNLKPFERDISTEIYQAGSTPCNGVEGFNCYFPLQSYGFQPTNGVGYQPYRVVVLSFELLHAPATVCGPKKSTNLVKNKCVNFNFNGLTGTGVLTESNKKFLPFQQFGRDIADTTDAVRDPQTLEILDITPCSFGGVSVITPGTNTSNQVAVLYQDVNCTEVPVAIHADQLTPTWRVYSTGSNVFQTRAGCLIGAEHVNNSYECDIPIGAGICASYQTQTNSPRRARSVASQSIIAYTMSLGAENSVAYSNNSIAIPTNFTISVTTEILPVSMTKTSVDCTMYICGDSTECSNLLLQYGSFCTQLNRALTGIAVEQDKNTQEVFAQVKQIYKTPPIKDFGGFNFSQILPDPSKPSKRSFIEDLLFNKVTLADAGFIKQYGDCLGDIAARDLICAQKFNGLTVLPPLLTDEMIAQYTSALLAGTITSGWTFGAGAALQIPFAMQMAYRFNGIGVTQNVLYENQKLIANQFNSAIGKIQDSLSSTASALGKLQDVVNQNAQALNTLVKQLSSNFGAISSVLNDILSRLDKVEAEVQIDRLITGRLQSLQTYVTQQLIRAAEIRASANLAATKMSECVLGQSKRVDFCGKGYHLMSFPQSAPHGVVFLHVTYVPAQEKNFTTAPAICHDGKAHFPREGVFVSNGTHWFVTQRNFYEPQIITTDNTFVSGNCDVVIGIVNNTVYDPLQPELDSFKEELDKYFKNHTSPDVDLGDISGINASVVNIQKEIDRLNEVAKNLNESLIDLQELGKYEQYIKWPWYIWLGFIAGLIAIVMVTIMLCCMTSCCSCLKGCCSCGSCCKFDEDDSEPVLKGVKLHYT

SEQ ID NO: 3 - protein, 1353 aa, synthetic construct
  REGION 1..1353: note = MERS WT Spike
MIHSVFLLMFLLTPTESYVDVGPDSVKSACIEVDIQQTFFDKTWPRPIDVSKADGIIYPQGRTYSNITITYQGLFPYQGDHGDMYVYSAGHATGTTPQKLFVANYSQDVKQFANGFVVRIGAAANSTGTVIISPSTSATIRKIYPAFMLGSSVGNFSDGKMGRFFNHTLVLLPDGCGTLLRAFYCILEPRSGNHCPAGNSYTSFATYHTPATDCSDGNYNRNASLNSFKEYFNLRNCTFMYTYNITEDEILEWFGITQTAQGVHLFSSRYVDLYGGNMFQFATLPVYDTIKYYSIIPHSIRSIQSDRKAWAAFYVYKLQPLTFLLDFSVDGYIRRAIDCGFNDLSQLHCSYESFDVESGVYSVSSFEAKPSGSVVEQAEGVECDFSPLLSGTPPQVYNFKRLVFTNCNYNLTKLLSLFSVNDFTCSQISPAAIASNCYSSLILDYFSYPLSMKSDLSVSSAGPISQFNYKQSFSNPTCLILATVPHNLTTITKPLKYSYINKCSRFLSDDRTEVPQLVNANQYSPCVSIVPSTVWEDGDYYRKQLSPLEGGGWLVASGSTVAMTEQLQMGFGITVQYGTDTNSVCPKLEFANDTKIASQLGNCVEYSLYGVSGRGVFQNCTAVGVRQQRFVYDAYQNLVGYYSDDGNYYCLRACVSVPVSVIYDKETKTHATLFGSVACEHISSTMSQYSRSTRSMLKRRDSTYGPLQTPVGCVLGLVNSSLFVEDCKLPLGQSLCALPDTPSTLTPRSVRSVPGEMRLASIAFNHPIQVDQLNSSYFKLSIPTNFSFGVTQEYIQTTIQKVTVDCKQYVCNGFQKCEQLLREYGQFCSKINQALHGANLRQDDSVRNLFASVKSSQSSPIIPGFGGDFNLTLLEPVSISTGSRSARSAIEDLLFDKVTIADPGYMQGYDDCMQQGPASARDLICAQYVAGYKVLPPLMDVNMEAAYTSSLLGSIAGVGWTAGLSSFAAIPFAQSIFYRLNGVGITQQVLSENQKLIANKFNQALGAMQTGFTTTNEAFHKVQDAVNNNAQALSKLASELSNTFGAISASIGDIIQRLDVLEQDAQIDRLINGRLTTLNAFVAQQLVRSESAALSAQLAKDKVNECVKAQSKRSGFCGQGTHIVSFVVNAPNGLYFMHVGYYPSNHIEVVSAYGLCDAANPTNCIAPVNGYFIKTNNTRIVDEWSYTGSSFYAPEPITSLNTKYVAPQVTYQNISTNLPPPLLGNSTGIDFQDELDEFFKNVSTSIPNFGSLTQINTTLLDLTYEMLSLQQVVKALNESYIDLKELGNYTYYNKWPWYIWLGFIAGLVALALCVFFILCCTGCGTNCMGKLKCNRCCDRYEEYDLEPHKVHVH

SEQ ID NO: 4 - protein, 1255 aa, synthetic construct
  REGION 1..1255: note = SARS WT Spike
MFIFLLFLTLTSGSDLDRCTTFDDVQAPNYTQHTSSMRGVYYPDEIFRSDTLYLTQDLFLPFYSNVTGFHTINHTFGNPVIPFKDGIYFAATEKSNVVRGWVFGSTMNNKSQSVIIINNSTNVVIRACNFELCDNPFFAVSKPMGTQTHTMIFDNAFNCTFEYISDAFSLDVSEKSGNFKHLREFVFKNKDGFLYVYKGYQPIDVVRDLPSGFNTLKPIFKLPLGINITNFRAILTAFSPAQDIWGTSAAAYFVGYLKPTTFMLKYDENGTITDAVDCSQNPLAELKCSVKSFEIDKGIYQTSNFRVVPSGDVVRFPNITNLCPFGEVFNATKFPSVYAWERKKISNCVADYSVLYNSTFFSTFKCYGVSATKLNDLCFSNVYADSFVVKGDDVRQIAPGQTGVIADYNYKLPDDFMGCVLAWNTRNIDATSTGNYNYKYRYLRHGKLRPFERDISNVPFSPDGKPCTPPALNCYWPLNDYGFYTTTGIGYQPYRVVVLSFELLNAPATVCGPKLSTDLIKNQCVNFNFNGLTGTGVLTPSSKRFQPFQQFGRDVSDFTDSVRDPKTSEILDISPCSFGGVSVITPGTNASSEVAVLYQDVNCTDVSTAIHADQLTPAWRIYSTGNNVFQTQAGCLIGAEHVDTSYECDIPIGAGICASYHTVSLLRSTSQKSIVAYTMSLGADSSIAYSNNTIAIPTNFSISITTEVMPVSMAKTSVDCNMYICGDSTECANLLLQYGSFCTQLNRALSGIAAEQDRNTREVFAQVKQMYKTPTLKYFGGFNFSQILPDPLKPTKRSFIEDLLFNKVTLADAGFMKQYGECLGDINARDLICAQKFNGLTVLPPLLTDDMIAAYTAALVSGTATAGWTFGAGAALQIPFAMQMAYRFNGIGVTQNVLYENQKQIANQFNKAISQIQESLTTTSTALGKLQDVVNQNAQALNTLVKQLSSNFGAISSVLNDILSRLDKVEAEVQIDRLITGRLQSLQTYVTQQLIRAAEIRASANLAATKMSECVLGQSKRVDFCGKGYHLMSFPQAAPHGVVFLHVTYVPSQERNFTTAPAICHEGKAYFPREGVFVFNGTSWFITQRNFFSPQIITTDNTFVSGNCDVVIGIINNTVYDPLQPELDSFKEELDKYFKNHTSPDVDLGDISGINASVVNIQKEIDRLNEVAKNLNESLIDLQELGKYEQYIKWPWYVWLGFIAGLIAIVMVTILLCCMTSCCSCLKGACSCGSCCKFDEDDSEPVLKGVKLHYT

SEQ ID NO: 5 - protein, 1273 aa, synthetic construct
  REGION 1..1273: note = B.1.351 Spike
MFVFLVLLPLVSSQCVNFTTRTQLPPAYTNSFTRGVYYPDKVFRSSVLHSTQDLFLPFFSNVTWFHAIHVSGTNGTKRFANPVLPFNDGVYFASTEKSNIIRGWIFGTTLDSKTQSLLIVNNATNVVIKVCEFQFCNDPFLGVYYHKNNKSWMESEFRVYSSANNCTFEYVSQPFLMDLEGKQGNFKNLREFVFKNIDGYFKIYSKHTPINLVRGLPQGFSALEPLVDLPIGINITRFQTLLALHISYLTPGDSSSGWTAGAAAYYVGYLQPRTFLLKYNENGTITDAVDCALDPLSETKCTLKSFTVEKGIYQTSNFRVQPTESIVRFPNITNLCPFGEVFNATRFASVYAWNRKRISNCVADYSVLYNSASFSTFKCYGVSPTKLNDLCFTNVYADSFVIRGDEVRQIAPGQTGNIADYNYKLPDDFTGCVIAWNSNNLDSKVGGNYNYLYRLFRKSNLKPFERDISTEIYQAGSTPCNGVKGFNCYFPLQSYGFQPTYGVGYQPYRVVVLSFELLHAPATVCGPKKSTNLVKNKCVNFNFNGLTGTGVLTESNKKFLPFQQFGRDIADTTDAVRDPQTLEILDITPCSFGGVSVITPGTNTSNQVAVLYQDVNCTEVPVAIHADQLTPTWRVYSTGSNVFQTRAGCLIGAEHVNNSYECDIPIGAGICASYQTQTNSPGSASSVASQSIIAYTMSLGVENSVAYSNNSIAIPTNFTISVTTEILPVSMTKTSVDCTMYICGDSTECSNLLLQYGSFCTQLNRALTGIAVEQDKNTQEVFAQVKQIYKTPPIKDFGGFNFSQILPDPSKPSKRSPIEDLLFNKVTLADAGFIKQYGDCLGDIAARDLICAQKFNGLTVLPPLLTDEMIAQYTSALLAGTITSGWTFGAGPALQIPFPMQMAYRFNGIGVTQNVLYENQKLIANQFNSAIGKIQDSLSSTPSALGKLQDVVNQNAQALNTLVKQLSSNFGAISSVLNDILSRLDPPEAEVQIDRLITGRLQSLQTYVTQQLIRAAEIRASANLAATKMSECVLGQSKRVDFCGKGYHLMSFPQSAPHGVVFLHVTYVPAQEKNFTTAPAICHDGKAHFPREGVFVSNGTHWFVTQRNFYEPQIITTDNTFVSGNCDVVIGIVNNTVYDPLQPELDSFKEELDKYFKNHTSPDVDLGDISGINASVVNIQKEIDRLNEVAKNLNESLIDLQELGKYEQYIKWPWYIWLGFIAGLIAIVMVTIMLCCMTSCCSCLKGCCSCGSCCKFDEDDSEPVLKGVKLHYT

SEQ ID NO: 6 - protein, 1273 aa, synthetic construct
  REGION 1..1273: note = B.1.617 Spike
MFVFLVLLPLVSSQCVNLTTRTQLPPAYTNSFTRGVYYPDKVFRSSVLHSTQDLFLPFFSNVTWFHAIHVSGTNGTKRFDNPVLPFNDGVYFASTEKSNIIRGWIFGTTLDSKTQSLLIVNNATNVVIKVCEFQFCNDPFLDVYYHKNNKSWMKSEFRVYSSANNCTFEYVSQPFLMDLEGKQGNFKNLREFVFKNIDGYFKIYSKHTPINLVRDLPQGFSALEPLVDLPIGINITRFQTLLALHRSYLTPGDSSSGWTAGAAAYYVGYLQPRTFLLKYNENGTITDAVDCALDPLSETKCTLKSFTVEKGIYQTSNFRVQPTESIVRFPNITNLCPFGEVFNATRFASVYAWNRKRISNCVADYSVLYNSASFSTFKCYGVSPTKLNDLCFTNVYADSFVIRGDEVRQIAPGQTGKIADYNYKLPDDFTGCVIAWNSNNLDSKVGGNYNYRYRLFRKSNLKPFERDISTEIYQAGSTPCNGVQGFNCYFPLQSYGFQPTNGVGYQPYRVVVLSFELLHAPATVCGPKKSTNLVKNKCVNFNFNGLTGTGVLTESNKKFLPFQQFGRDIADTTDAVRDPQTLEILDITPCSFGGVSVITPGTNTSNQVAVLYQGVNCTEVPVAIHADQLTPTWRVYSTGSNVFQTRAGCLIGAEHVNNSYECDIPIGAGICASYQTQTNSRGSASSVASQSIIAYTMSLGAENSVAYSNNSIAIPTNFTISVTTEILPVSMTKTSVDCTMYICGDSTECSNLLLQYGSFCTQLNRALTGIAVEQDKNTQEVFAQVKQIYKTPPIKDFGGFNFSQILPDPSKPSKRSPIEDLLFNKVTLADAGFIKQYGDCLGDIAARDLICAQKFNGLTVLPPLLTDEMIAQYTSALLAGTITSGWTFGAGPALQIPFPMQMAYRFNGIGVTQNVLYENQKLIANQFNSAIGKIQDSLSSTPSALGKLQDVVNQNAQALNTLVKQLSSNFGAISSVLNDILSRLDPPEAEVQIDRLITGRLQSLQTYVTQQLIRAAEIRASANLAATKMSECVLGQSKRVDFCGKGYHLMSFPQSAPHGVVFLHVTYVPAHEKNFTTAPAICHDGKAHFPREGVFVSNGTHWFVTQRNFYEPQIITTDNTFVSGNCDVVIGIVNNTVYDPLQPELDSFKEELDKYFKNHTSPDVDLGDISGINASVVNIQKEIDRLNEVAKNLNESLIDLQELGKYEQYIKWPWYIWLGFIAGLIAIVMVTIMLCCMTSCCSCLKGCCSCGSCCKFDEDDSEPVLKGVKLHYT

SEQ ID NO: 7 - protein, 1271 aa, synthetic construct
  REGION 1..1271: note = B.1.617.2 Spike
MFVFLVLLPLVSSQCVNLRTRTQLPPAYTNSFTRGVYYPDKVFRSSVLHSTQDLFLPFFSNVTWFHAIHVSGTNGTKRFDNPVLPFNDGVYFASTEKSNIIRGWIFGTTLDSKTQSLLIVNNATNVVIKVCEFQFCNDPFLDVYYHKNNKSWMESGVYSSANNCTFEYVSQPFLMDLEGKQGNFKNLREFVFKNIDGYFKIYSKHTPINLVRDLPQGFSALEPLVDLPIGINITRFQTLLALHRSYLTPGDSSSGWTAGAAAYYVGYLQPRTFLLKYNENGTITDAVDCALDPLSETKCTLKSFTVEKGIYQTSNFRVQPTESIVRFPNITNLCPFGEVFNATRFASVYAWNRKRISNCVADYSVLYNSASFSTFKCYGVSPTKLNDLCFTNVYADSFVIRGDEVRQIAPGQTGKIADYNYKLPDDFTGCVIAWNSNNLDSKVGGNYNYRYRLFRKSNLKPFERDISTEIYQAGSKPCNGVEGFNCYFPLQSYGFQPTNGVGYQPYRVVVLSFELLHAPATVCGPKKSTNLVKNKCVNFNFNGLTGTGVLTESNKKFLPFQQFGRDIADTTDAVRDPQTLEILDITPCSFGGVSVITPGTNTSNQVAVLYQGVNCTEVPVAIHADQLTPTWRVYSTGSNVFQTRAGCLIGAEHVNNSYECDIPIGAGICASYQTQTNSRGSASSVASQSIIAYTMSLGAENSVAYSNNSIAIPTNFTISVTTEILPVSMTKTSVDCTMYICGDSTECSNLLLQYGSFCTQLNRALTGIAVEQDKNTQEVFAQVKQIYKTPPIKDFGGFNFSQILPDPSKPSKRSPIEDLLFNKVTLADAGFIKQYGDCLGDIAARDLICAQKFNGLTVLPPLLTDEMIAQYTSALLAGTITSGWTFGAGPALQIPFPMQMAYRFNGIGVTQNVLYENQKLIANQFNSAIGKIQDSLSSTPSALGKLQNVVNQNAQALNTLVKQLSSNFGAISSVLNDILSRLDPPEAEVQIDRLITGRLQSLQTYVTQQLIRAAEIRASANLAATKMSECVLGQSKRVDFCGKGYHLMSFPQSAPHGVVFLHVTYVPAQEKNFTTAPAICHDGKAHFPREGVFVSNGTHWFVTQRNFYEPQIITTDNTFVSGNCDVVIGIVNNTVYDPLQPELDSFKEELDKYFKNHTSPDVDLGDISGINASVVNIQKEIDRLNEVAKNLNESLIDLQELGKYEQYIKWPWYIWLGFIAGLIAIVMVTIMLCCMTSCCSCLKGCCSCGSCCKFDEDDSEPVLKGVKLHYT

SEQ ID NO: 8 - protein, 1270 aa, synthetic construct
  REGION 1..1270: note = B.1.1.7 spike
MFVFLVLLPLVSSQCVNLTTRTQLPPAYTNSFTRGVYYPDKVFRSSVLHSTQDLFLPFFSNVTWFHAISGTNGTKRFDNPVLPFNDGVYFASTEKSNIIRGWIFGTTLDSKTQSLLIVNNATNVVIKVCEFQFCNDPFLGVYHKNNKSWMESEFRVYSSANNCTFEYVSQPFLMDLEGKQGNFKNLREFVFKNIDGYFKIYSKHTPINLVRDLPQGFSALEPLVDLPIGINITRFQTLLALHRSYLTPGDSSSGWTAGAAAYYVGYLQPRTFLLKYNENGTITDAVDCALDPLSETKCTLKSFTVEKGIYQTSNFRVQPTESIVRFPNITNLCPFGEVFNATRFASVYAWNRKRISNCVADYSVLYNSASFSTFKCYGVSPTKLNDLCFTNVYADSFVIRGDEVRQIAPGQTGKIADYNYKLPDDFTGCVIAWNSNNLDSKVGGNYNYLYRLFRKSNLKPFERDISTEIYQAGSTPCNGVEGFNCYFPLQSYGFQPTYGVGYQPYRVVVLSFELLHAPATVCGPKKSTNLVKNKCVNFNFNGLTGTGVLTESNKKFLPFQQFGRDIDDTTDAVRDPQTLEILDITPCSFGGVSVITPGTNTSNQVAVLYQDVNCTEVPVAIHADQLTPTWRVYSTGSNVFQTRAGCLIGAEHVNNSYECDIPIGAGICASYQTQTNSHRRARSVASQSIIAYTMSLGAENSVAYSNNSIAIPINFTISVTTEILPVSMTKTSVDCTMYICGDSTECSNLLLQYGSFCTQLNRALTGIAVEQDKNTQEVFAQVKQIYKTPPIKDFGGFNFSQILPDPSKPSKRSFIEDLLFNKVTLADAGFIKQYGDCLGDIAARDLICAQKFNGLTVLPPLLTDEMIAQYTSALLAGTITSGWTFGAGAALQIPFAMQMAYRFNGIGVTQNVLYENQKLIANQFNSAIGKIQDSLSSTASALGKLQDVVNQNAQALNTLVKQLSSNFGAISSVLNDILARLDKVEAEVQIDRLITGRLQSLQTYVTQQLIRAAEIRASANLAATKMSECVLGQSKRVDFCGKGYHLMSFPQSAPHGVVFLHVTYVPAQEKNFTTAPAICHDGKAHFPREGVFVSNGTHWFVTQRNFYEPQIITTHNTFVSGNCDVVIGIVNNTVYDPLQPELDSFKEELDKYFKNHTSPDVDLGDISGINASVVNIQKEIDRLNEVAKNLNESLIDLQELGKYEQYIKWPWYIWLGFIAGLIAIVMVTIMLCCMTSCCSCLKGCCSCGSCCKFDEDDSEPVLKGVKLHYT

SEQ ID NO: 9 - protein, 1255 aa, synthetic construct
  REGION 1..1255: note = SARS 6x P
MFIFLLFLTLTSGSDLDRCTTFDDVQAPNYTQHTSSMRGVYYPDEIFRSDTLYLTQDLFLPFYSNVTGFHTINHTFDNPVIPFKDGIYFAATEKSNVVRGWVFGSTMNNKSQSVIIINNSTNVVIRACNFELCDNPFFAVSKPMGTQTHTMIFDNAFNCTFEYISDAFSLDVSEKSGNFKHLREFVFKNKDGFLYVYKGYQPIDVVRDLPSGFNTLKPIFKLPLGINITNFRAILTAFSPAQDTWGTSAAAYFVGYLKPTTFMLKYDENGTITDAVDCSQNPLAELKCSVKSFEIDKGIYQTSNFRVVPSGDVVRFPNITNLCPFGEVFNATKFPSVYAWERKKISNCVADYSVLYNSTFFSTFKCYGVSATKLNDLCFSNVYADSFVVKGDDVRQIAPGQTGVIADYNYKLPDDFMGCVLAWNTRNIDATSTGNYNYKYRYLRHGKLRPFERDISNVPFSPDGKPCTPPALNCYWPLNDYGFYTTTGIGYQPYRVVVLSFELLNAPATVCGPKLSTDLIKNQCVNFNFNGLTGTGVLTPSSKRFQPFQQFGRDVSDFTDSVRDPKTSEILDISPCSFGGVSVITPGTNASSEVAVLYQDVNCTDVSTAIHADQLTPAWRIYSTGNNVFQTQAGCLIGAEHVDTSYECDIPIGAGICASYHTVSLLRSTSQKSIVAYTMSLGADSSIAYSNNTIAIPTNFSISITTEVMPVSMAKTSVDCNMYICGDSTECANLLLQYGSFCTQLNRALSGIAAEQDRNTREVFAQVKQMYKTPTLKYFGGFNFSQILPDPLKPTKRSPIEDLLFNKVTLADAGFMKQYGECLGDINARDLICAQKFNGLTVLPPLLTDDMIAAYTAALVSGTATAGWTFGAGPALQIPFPMQMAYRFNGIGVTQNVLYENQKQIANQFNKAISQIQESLTTTPTALGKLQDVVNQNAQALNTLVKQLSSNFGAISSVLNDILSRLDPPEAEVQIDRLITGRLQSLQTYVTQQLIRAAEIRASANLAATKMSECVLGQSKRVDFCGKGYHLMSFPQAAPHGVVFLHVTYVPSQERNFTTAPAICHEGKAYFPREGVFVFNGTSWFITQRNFFSPQIITTDNTFVSGNCDVVIGIINNTVYDPLQPELDSFKEELDKYFKNHTSPDVDLGDISGINASVVNIQKEIDRLNEVAKNLNESLIDLQELGKYEQYIKWPWYVWLGFIAGLIAIVMVTILLCCMTSCCSCLKGACSCGSCCKFDEDDSEPVLKGVKLHYT

SEQ ID NO: 10 - protein, 1320 aa, synthetic construct
  REGION 1..1320: note = MERS 6x P
MIHSVFLLMFLLTPTESYVDVGPDSVKSACIEVDIQQTFFDKTWPRPIDVSKADGIIYPQGRTYSNITITYQGLFPYQGDHGDMYVYSAGHATGTTPQKLFVANYSQDVKQFANGFVVRIGAAANSTGTVIISPSTSATIRKIYPAFMLGSSVGNFSDGKMGRFFNHTLVLLPDGCGTLLRAFYCILEPRSGNHCPAGNSYTSFATYHTPATDCSDGNYNRNASLNSFKEYFNLRNCTFMYTYNITEDEILEWFGITQTAQGVHLFSSRYVDLYGGNMFQFATLPVYDTIKYYSIIPHSIRSIQSDRKAWAAFYVYKLQPLTFLLDFSVDGYIRRAIDCGFNDLSQLHCSYESFDVESGVYSVSSFEAKPSGSVVEQAEGVECDFSPLLSGTPPQVYNFKRLVFTNCNYNLTKLLSLFSVNDFTCSQISPAAIASNCYSSLILDYFSYPLSMKSDLSVSSAGPISQFNYKQSFSNPTCLILATVPHNLTTITKPLKYSYINKCSRLLSDDRTEVPQLVNANQYSPCVSIVPSTVWEDGDYYRKQLSPLEGGGWLVASGSTVAMTEQLQMGFGITVQYGTDTNSVCPKLEFANDTKIASQLGNCVEYSLYGVSGRGVFQNCTAVGVRQQRFVYDAYQNLVGYYSDDGNYYCLRACVSVPVSVIYDKETKTHATLFGSVACEHISSTMSQYSRSTRSMLKRRDSTYGPLQTPVGCVLGLVNSSLFVEDCKLPLGQSLCALPDTPSTLTPRSVRSVPGEMRLASIAFNHPIQVDQLNSSYFKLSIPTNFSFGVTQEYIQTTIQKVTVDCKQYVCNGFQKCEQLLREYGQFCSKINQALHGANLRQDDSVRNLFASVKSSQSSPIIPGFGGDFNLTLLEPVSISTGSRSARSPIEDLLFDKVTIADPGYMQGYDDCMQQGPASARDLICAQYVAGYKVLPPLMDVNMEAAYTSSLLGSIAGVGWTAGLSPFAAIPFPQSIFYRLNGVGITQQVLSENQKLIANKFNQALGAMQTGFTTTPEAFQKVQDAVNNNAQALSKLASELSNTFGAISASIGDIIQRLDPPEQDAQIDRLINGRLTTLNAFVAQQLVRSESAALSAQLAKDKVNECVKAQSKRSGFCGQGTHIVSFVVNAPNGLYFMHVGYYPSNHIEVVSAYGLCDAANPTNCIAPVNGYFIKTNNTRIVDEWSYTGSSFYAPEPITSLNTKYVAPQVTYQNISTNLPPPLLGNSTGIDFQDELDEFFKNVSTSIPNFGSLTQINTTLLDLTYEMLSLQQVVKALNESYIDLKELGNYTYYNKWPWYIWLGFIAGLVALALCVFFILCC

SEQ ID NO: 11 - protein, 4 aa, synthetic construct
  REGION 1..4: note = Furin Cleavage
GSAS

SEQ ID NO: 12 - protein, 26 aa, synthetic construct
  REGION 1..26: note = fibritin Foldon
GYIPEAPRDGQAYVRKDGEWVLLSTF

SEQ ID NO: 13 - protein, 16 aa, synthetic construct
  REGION 1..16: note = Spy Tag
RGVPHIVMVDAYKRYK

SEQ ID NO: 14 - protein, 113 aa, synthetic construct
  REGION 1..113: note = SPY Catcher
VTTLSGLSGEQGPSGDMTTEEDSATHIKFSKRDEDGRELAGATMELRDSSGKTISTWISDGHVKDFYLYPGKYTFVETAAPDGYEVATPIEFTVNEDGQVTVDGEATEGDAHT

SEQ ID NO: 15 - protein, 4 aa, synthetic construct
  REGION 1..4: note = Cleavage
RRAR

SEQ ID NO: 16 - protein, 4 aa, synthetic construct
  REGION 1..4: note = Cleavage
GSSS

SEQ ID NO: 17 - protein, 4 aa, synthetic construct
  REGION 1..4: note = Cleavage
GSGS

SEQ ID NO: 18 - protein, 293 aa, synthetic construct
  REGION 1..293: note = pJP61 antigen
MVNCTEVPVAIHADQLTPTWRVYSTGSNVFQTAAYNGTITVEELKKLLEQAAYYVYSRVKNLNSSRVPDLLVAAYNGPQNQRNAPRITFGGPSDSTGSNQNGERSGARSKQRRPQGLPNNAAYYQTQTNSPRRARSVASQSIIAYTMSLGAENSVAYSNNSIAAYEVRQIAPGQTGKIADYNYKAAYKLGASQRVAGDSGFAAYSRYRIGNYKAAYDAYKTFPPTEPKKDKKKKADETQALPQRQKKQQTVTLLAAYGKQGNFKNLREFVFKNIDGYFKIYSKHAAYHHHHHH

SEQ ID NO: 19 - protein, 223 aa, synthetic construct
  REGION 1..223: note = pJP62 antigen
MFVFLVLLPLAAYNLIDSYFVVAAYLLLDRLNQLAAYKLLEQWNLVAAYVLLFLAFVVAAYLLSAGIFGAAAYVLAWLYAAVAAYALWEIQQVVAAYTMADLVYALAAYFLWLLWPVTAAYFLAFVVFLLAAYFLKKDAPYIAAYFLNRFTTTLAAYLLMPILTLTAAYKIADYNYKLAAYFTISVTTEIAAYFVLAAVYRIAAYYLATALLTLAAYHHHHHH

SEQ ID NO: 20 - protein, 295 aa, synthetic construct
  REGION 1..295: note = pJP63 antigen
MTQDLFLPFFSNVTWFAAYDGVPFVVSTGYHFREAAYDDQIGYYRRATRRIRAAYWICLLQFAYANRNRFAAYSVLLFLAFVVFLLVTAAYNEFACVVADAVIKTLAAYDLLIRKSNHNFLVQAAAYAIASEFSSLPSYAAFAAYKYLYFIKGLNNLNRGAAYLLLLDRLNQLESKMSAAYMWLSYFIASFRLFARAAYEFVFKNIDGYFKIYSAAYFHQKLLKSIAATRGAAAYFLLVTLAILTALRLCAAYSGYLKLTDNVYIKNAAAYPLNIIPLTTAAKLMVAAYHHHHHH

SEQ ID NO: 21 - protein, 308 aa, synthetic construct
  REGION 1..308: note = pJP64 antigen
MTPINLVRDLPQGFSALEPLVAAYLNQLESKMSGKGQQQQGQTVTKKSAAEASKKPRQKRTATKAYNVTQAFGRRGPEQTQAAYYLQPRTFLLAAYLPFFSNVTWFHAIHVAAYDAALALLLLDRLNQLAAYFLFLTWICLAAYNRNRFLYIIKLIFLWAAYSEETGTLIVNSVLLFAAYTNGTKRFDNPVLPFNAAYHGKEDLKFPRGQGVPINTNSSPDDQIGYYRRATRRIAAYSVLLFLAFVAAYRFPNITNLCPFGEVFNATRFAAYTLACFVLAAVYRINWAAYFLLVTLAILAAYHHHHHH

SEQ ID NO: 22 - protein, 301 aa, synthetic construct
  REGION 1..301: note = pJP65 antigen
MCNDPFLGVYYHKNNKSWMESEFRVAAYDLDDFSKQLQQSMSSADSTAAYSLLIVNNATNVVIKVAAYNLLKDCPAVAAYFHQKLLKSIAATRGAAAYVVQTIEVNSFSGYLKAAYYKFVRIQPGQTFSVLAAYAKLMVVIPDYNTYKNAAYVLKLKVDTANPKTPKAAYTGIAVEQDKNTQEVFAQVKQIYKTPPIKDFGGFNFSQILPDPSKPSKRSFIEDLLFNKVTLADAGFIKQYGDCLAAYRGMVLGSLAATVRLQAAYALAYYNTTKAAYPTVVVNAANVYLKHGAAYHHHHHH

SEQ ID NO: 23 - DNA, 610 bp, synthetic construct
  misc_feature 1..610: note = 46_gb0
  source 1..610: mol_type = other DNA
gtgggaggtctatataagcagagctctctggctaactagagaacccactgcttactggcttatcgaaattaatacgactcactatagggagacccaagctggctagccaccgagaataaactagtattcttctggtccccacagactcagagagaacccgccaccatgtttgtgttcctggtgctgctgccactggtgtccagccagtgtgtgaacctgaccaccaggacccaacttcctcctgcctacaccaactccttcaccaggggagtctactaccctgacaaggtgttcaggtcctctgtgctgcacagcacccaggacctgttcctgccattcttcagcaatgtgacctggttccatgtgatctctggcaccaatggcaccaagaggtttgacaaccctgtgctgccattcaatgatggagtctactttgccagcatcgagaagagcaacatcatcaggggctggatttttggcaccaccctggacagcaagacccagtccctgctgattgtgaacaatgccaccaatgtggtgattaaggtgtgtgagttccagttctgtaatgacccattcctggaccacaagaacaacaagtcctggatgg

SEQ ID NO: 24 - DNA, 636 bp, synthetic construct
  misc_feature 1..636: note = 46_gb1
  source 1..636: mol_type = other DNA
cacaagaacaacaagtcctggatggagtctgagttcagggtctactcctctgccaacaactgtacctttgaatatgtgagccaaccattcctgatggacttggagggcaagcagggcaacttcaagaacctgagggagtttgtgttcaagaacattgatggctacttcaagatttacagcaaacacacaccaatcatcgtgagggagcccgaggacctgccacagggcttctctgccttggaaccactggtggacctgccaattggcatcaacatcaccaggttccagaccctgctggctctgcacaggtcctacctgacacctggagactcctcctctggctggacagcaggagcagcagcctactatgtgggctacctccaaccaaggaccttcctgctgaaatacaatgagaatggcaccatcacagatgctgtggactgtgccctggacccactgtctgagaccaagtgtaccctgaaatccttcacagtggagaagggcatctaccagaccagcaacttcagggtccaaccaacagagagcattgtgaggtttccaaacatcaccaacctgtgtccatttgacgaggtgttcaacgccaccaggtttgcctctgtctatgcctggaacagg

SEQ ID NO: 25 - DNA, 971 bp, synthetic construct
  misc_feature 1..971: note = 46_gb2
  source 1..971: mol_type = other DNA
gcctctgtctatgcctggaacaggaagaggattagcaactgtgtggctgactactctgtgctctacaacctggcccccttcttcaccttcaagtgttatggagtgagcccaaccaaactgaatgacctgtgtttcaccaatgtctatgctgactcctttgtgattaggggagatgaggtgagacagattgcccctggacaaacaggcaacattgctgactacaactacaaactgcctgatgacttcacaggctgtgtgattgcctggaacagcaacaagctggacagcaaggtgagcggcaactacaactacctctacagactgttcaggaagagcaacctgaaaccatttgagagggacatcagcacagagatttaccaggctggcaacaagccatgtaatggagtggccggcttcaactgttactttccactccggtcctatagcttccggccaacctacggagtgggccaccaaccatacagggtggtggtgctgtcctttgaactgctccatgcccctgccacagtgtgtggaccaaagaagagcaccaacctggtgaagaacaagtgtgtgaacttcaacttcaatggactgaagggcacaggagtgctgacagagagcaacaagaagttcctgccattccaacagtttggcagggacattgctgacaccacagatgctgtgagggacccacagaccttggagattctggacatcacaccatgttcctttggaggagtgtctgtgattacacctggcaccaacaccagcaaccaggtggctgtgctctaccagggcgtgaactgtactgaggtgcctgtggctatccatgctgaccaacttacaccaacctggagggtctacagcacaggcagcaatgtgttccagaccagggctggctgtctgattggagcagagtacgtgaacaactcctatgagtgtgacatcccaattggagcaggcatctg

SEQ ID NO: 26 - DNA, 997 bp, synthetic construct
  misc_feature 1..997: note = 46_gb3
  source 1..997: mol_type = other DNA
cccaattggagcaggcatctgtgcctcctaccagacccagaccaagagccacggctctgcatcttctgtggcaagccagagcatcattgcctacacaatgagtctgggagcagagaactctgtggcttacagcaacaacagcattgccatcccaaccaacttcaccatctctgtgaccacagagattctgcctgtgagtatgaccaagacctctgtggactgtacaatgtatatctgtggagacagcacagagtgtagcaacctgctgctccaatatggctccttctgtacccaacttaagagggctctgacaggcattgctgtggaacaggacaagaacacccaggaggtgtttgcccaggtgaagcagatttacaagacacctccaatcaagtactttggaggcttcaacttcagccagattctgcctgacccaagcaagccaagcaagaggtcccctattgaggacctgctgttcaacaaggtgaccctggctgatgctggcttcatcaagcaatatggagactgtctgggagacattgctgccagggacctgatttgtgcccagaagttcaagggactgacagtgctgcctccactgctgacagatgagatgattgcccaatacacctctgccctgctggctggcaccatcacctctggctggacctttggagcaggaccagccctccaaatcccatttccaatgcagatggcttacaggttcaatggcattggagtgacccagaatgtgctctatgagaaccagaaactgattgccaaccagttcaactctgccattggcaagattcaggactccctgtccagcacaccatctgccctgggcaaactccaagatgtggtgaaccacaatgcccaggctctgaacaccctggtgaagcaactttccagcaagtttggagccatctcctctgtgctgaatgacatcttcagcagactggacccaccagaggctgaggtccagattgacagactg

SEQ ID NO: 27 - DNA, 476 bp, synthetic construct
  misc_feature 1..476: note = 47_gb0
  source 1..476: mol_type = other DNA
cactatagggagacccaagctggctagccaccatgtttgtgttcctggtgctgctgccactggtgtccagccagtgtgtgaacctgaccaccaggacccaacttcctcctgcctacaccaactccttcaccaggggagtctactaccctgacaaggtgttcaggtcctctgtgctgcacagcacccaggacctgttcctgccattcttcagcaatgtgacctggttccatgtgatctctggcaccaatggcaccaagaggtttgacaaccctgtgctgccattcaatgatggagtctactttgccagcatcgagaagagcaacatcatcaggggctggatttttggcaccaccctggacagcaagacccagtccctgctgattgtgaacaatgccaccaatgtggtgattaaggtgtgtgagttccagttctgtaatgacccattcctggaccacaagaacaacaagtcctggatg

SEQ ID NO: 28 - DNA, 997 bp, synthetic construct
  misc_feature 1..997: note = 47_gb3
  source 1..997: mol_type = other DNA
cccaattggagcaggcatctgtgcctcctaccagacccagaccaagagccacaggagggcaaggtctgtggcaagccagagcatcattgcctacacaatgagtctgggagcagagaactctgtggcttacagcaacaacagcattgccatcccaaccaacttcaccatctctgtgaccacagagattctgcctgtgagtatgaccaagacctctgtggactgtacaatgtatatctgtggagacagcacagagtgtagcaacctgctgctccaatatggctccttctgtacccaacttaagagggctctgacaggcattgctgtggaacaggacaagaacacccaggaggtgtttgcccaggtgaagcagatttacaagacacctccaatcaagtactttggaggcttcaacttcagccagattctgcctgacccaagcaagccaagcaagaggtccttcattgaggacctgctgttcaacaaggtgaccctggctgatgctggcttcatcaagcaatatggagactgtctgggagacattgctgccagggacctgatttgtgcccagaagttcaagggactgacagtgctgcctccactgctgacagatgagatgattgcccaatacacctctgccctgctggctggcaccatcacctctggctggacctttggagcaggagcagccctccaaatcccatttgctatgcagatggcttacaggttcaatggcattggagtgacccagaatgtgctctatgagaaccagaaactgattgccaaccagttcaactctgccattggcaagattcaggactccctgtccagcacagcctctgccctgggcaaactccaagatgtggtgaaccacaatgcccaggctctgaacaccctggtgaagcaactttccagcaagtttggagccatctcctctgtgctgaatgacatcttcagcagactggacaaggtggaggctgaggtccagattgacagactg

SEQ ID NO: 29 - DNA, 21 bp, synthetic construct
  misc_feature 1..21: note = CMV-F
  source 1..21: mol_type = other DNA
cgcaaatgggcggtaggcgtg

SEQ ID NO: 30 - DNA, 23 bp, synthetic construct
  misc_feature 1..23: note = 47_F1
  source 1..23: mol_type = other DNA
gggcttctctgccttggaaccac

SEQ ID NO: 31 - DNA, 24 bp, synthetic construct
  misc_feature 1..24: note = 47_F2
  source 1..24: mol_type = other DNA
ggcaacaagccatgtaatggagtg

SEQ ID NO: 32 - DNA, 25 bp, synthetic construct
  misc_feature 1..25: note = 47_F3
  source 1..25: mol_type = other DNA
ctacacaatgagtctgggagcagag

SEQ ID NO: 33 - DNA, 9490 bp, synthetic construct
  misc_feature 1..9490: note = pZF56 Omicron BA2 spike hexapro RNA
  source 1..9490: mol_type = other DNA
gacggatcgggagatctcccgatcccctatggtgcactctcagtacaatctgctctgatgccgcatagttaagccagtatctgctccctgcttgtgtgttggaggtcgctgagtagtgcgcgagcaaaatttaagctacaacaaggcaaggcttgaccgacaattgcatgaagaatctgcttagggttaggcgttttgcgctgcttcgcgatgtacgggccagatatacgcgttgacattgattattgactagttattaatagtaatcaattacggggtcattagttcatagcccatatatggagttccgcgttacataacttacggtaaatggcccgcctggctgaccgcccaacgacccccgcccattgacgtcaataatgacgtatgttcccatagtaacgccaatagggactttccattgacgtcaatgggtggagtatttacggtaaactgcccacttggcagtacatcaagtgtatcatatgccaagtacgccccctattgacgtcaatgacggtaaatggcccgcctggcattatgcccagtacatgaccttatgggactttcctacttggcagtacatctacgtattagtcatcgctattaccatggtgatgcggttttggcagtacatcaatgggcgtggatagcggtttgactcacggggatttccaagtctccaccccattgacgtcaatgggagtttgttttggcaccaaaatcaacgggactttccaaaatgtcgtaacaactccgccccattgacgcaaatgggcggtaggcgtgtacggtgggaggtctatataagcagagctctctggctaactagagaacccactgcttactggcttatcgaaattaatacgactcactatagggagacccaagctggctagccaccgagaataaactagtattcttctggtccccacagactcagagagaacccgccaccatgtttgtgttcctggtgctgctgccactggtgtccagccagtgtgtgaacctgatcaccaggacccaaagctacaccaactccttcaccaggggagtctactaccctgacaaggtgttcaggtcctctgtgctgcacagcacccaggacctgttcctgccattcttcagcaatgtgacctggttccatgccatccacgtgtctggcaccaatggcaccaagaggtttgacaaccctgtgctgccattcaatgatggagtctactttgccagcaccgagaagagcaacatcatcaggggctggatttttggcaccaccctggacagcaagacccagtccctgctgattgtgaacaatgccaccaatgtggtgattaaggtgtgtgagttccagttctgtaatgacccattcctggacgtgtactaccacaagaacaacaagtcctggatggagtctgagttcagggtctactcctctgccaacaactgtacctttgaatatgtgagccaaccattcctgatggacttggagggcaagcagggcaacttcaagaacctgagggagtttgtgttcaagaacattgatggctacttcaagatttacagcaaacacacaccaatcaacctgggcagagacctgccacagggcttctctgccttggaaccactggtggacctgccaattggcatcaacatcaccaggttccagaccctgctggctctgcacaggtcctacctgacacctggagactcctcctctggctggacagcaggagcagcagcctactatgtgggctacctccaaccaaggaccttcctgctgaaatacaatgagaatggcaccatcacagatgctgtggactgtgccctggacccactgtctgagaccaagtgtaccctgaaatccttcacagtggagaagggcatctaccagaccagcaacttcagggtccaaccaacagagagcattgtgaggtttccaaacatcaccaacctgtgtccatttgacgaggtgttcaacgccaccaggtttgcctctgtctatgcctggaacaggaagaggattagcaactgtgtggctgactactctgtgctctacaacttcgcccccttcttcgccttcaagtgttatggagtgagcccaaccaaactgaatgacctgtgtttcaccaatgtctatgctgactcctttgtgattaggggaaacgaggtgagccagattgcccctggacaaacaggcaacattgctgactacaactacaaactgcctgatgacttcacaggctgtgtgattgcctggaacagcaacaagctggacagcaaggtgggcggcaactacaactacctctacagactgttcaggaagagcaacctgaaaccatttgagagggacatcagcacagagatttaccaggctggcaacaagccatgtaatggagtggccggcttcaactgttactttccactccggtcctatggcttccggccaacctacggagtgggccaccaaccatacagggtggtggtgctgtcctttgaactgctccatgcccctgccacagtgtgtggaccaaagaagagcaccaacctggtgaagaacaagtgtgtgaacttcaacttcaatggactgaccggcacaggagtgctgacagagagcaacaagaagttcctgccattccaacagtttggcagggacattgctgacaccacagatgctgtgagggacccacagaccttggagattctggacatcacaccatgttcctttggaggagtgtctgtgattacacctggcaccaacaccagcaaccaggtggctgtgctctaccagggcgtgaactgtactgaggtgcctgtggctatccatgctgaccaacttacaccaacctggagggtctacagcacaggcagcaatgtgttccagaccagggctggctgtctgattggagcagagtacgtgaacaactcctatgagtgtgacatcccaattggagcaggcatctgtgcctcctaccagacccagaccaagagccacaggagggcaaggtctgtggcaagccagagcatcattgcctacacaatgagtctgggagcagagaactctgtggcttacagcaacaacagcattgccatcccaaccaacttcaccatctctgtgaccacagagattctgcctgtgagtatgaccaagacctctgtggactgtacaatgtatatctgtggagacagcacagagtgtagcaacctgctgctccaatatggctccttctgtacccaacttaagagggctctgacaggcattgctgtggaacaggacaagaacacccaggaggtgtttgcccaggtgaagcagatttacaagacacctccaatcaagtactttggaggcttcaacttcagccagattctgcctgacccaagcaagccaagcaagaggtcccctattgaggacctgctgttcaacaaggtgaccctggctgatgctggcttcatcaagcaatatggagactgtctgggagacattgctgccagggacctgatttgtgcccagaagttcaacggactgacagtgctgcctccactgctgacagatgagatgattgcccaatacacctctgccctgctggctggcaccatcacctctggctggacctttggagcaggaccagccctccaaatcccatttccaatgcagatggcttacaggttcaatggcattggagtgacccagaatgtgctctatgagaaccagaaactgattgccaaccagttcaactctgccattggcaagattcaggactccctgtccagcacaccatctgccctgggcaagctccaagatgtggtgaaccacaatgcccaggctctgaacaccctggtgaagcaactttccagcaagtttggagccatctcctctgtgctgaatgacatcctgagcagactggacccaccagaggctgaggtccagattgacagactgattacaggcagactccaatccctccaaacctatgtgacccaacaacttatcagggctgctgagattagggcatctgccaacctggctgccaccaagatgagtgagtgtgtgctgggacaaagcaagagggtggacttctgtggcaagggctaccacctgatgagttttccacagtctgcccctcatggagtggtgttcctgcatgtgacctatgtgcctgcccaggagaagaacttcaccacagcccctgccatctgccatgatggcaaggctcactttccaagggagggagtgtttgtgagcaatggcacccactggtttgtgacccagaggaacttctatgaaccacagattatcaccacagacaacacctttgtgtctggcaactgtgatgtggtgattggcattgtgaacaacacagtctatgacccactccaacctgaactggactccttcaaggaggaactggacaaatacttcaagaaccacaccagccctgatgtggacctgggagacatctctggcatcaatgcctctgtggtgaacatccagaaggagattgacagactgaatgaggtggctaagaacctgaatgagtccctgattgacctccaagaactgggcaaatatgaacaatacatcaagtggccatggtacatctggctgggcttcattgctggactgattgccattgtgatggtgaccataatgctgtgttgtatgacctcctgttgttcctgtctgaaaggctgttgttcctgtggctcctgttgtaagtttgatgaggatgactctgaacctgtgctgaaaggagtgaaactgcactacacctgactcgagctggtactgcatgcacgcaatgctagctgcccctttcccgtcctgggtaccccgagtctcccccgacctcgggtcccaggtatgctcccacctccacctgccccactcaccacctctgctagttccagacacctcccaagcacgcagcaatgcagctcaaaacgcttagcctagccacacccccacgggaaacagcagtgattaacctttagcaataaacgaaagtttaactaagctatactaaccccagggttggtcaatttcgtgccagccacaccctggagctagcaaaccgctgatcagcctcgactgtgccttctagttgccagccatctgttgtttgcccctcccccgtgccttccttgaccctggaaggtgccactcccactgtcctttcctaataaaatgaggaaattgcatcgcattgtctgagtaggtgtcattctattctggggggtggggtggggcaggacagcaagggggaggattgggaagacaatagcaggcatgctggggatgcggtgggctctatggcttctgaggcggaaagaaccagctggggctctagggggtatccccacgcgccctgtagcggcgcattaagcgcggcgggtgtggtggttacgcgcagcgtgaccgctacacttgccagcgccctagcgcccgctcctttcgctttcttcccttcctttctcgccacgttcgccggctttccccgtcaagctctaaatcgggggctccctttagggttccgatttagtgctttacggcacctcgaccccaaaaaacttgattagggtgatggttcacgtagtgggccatcgccctgatagacggtttttcgccctttgacgttggagtccacgttctttaatagtggactcttgttccaaactggaacaacactcaaccctatctcggtctattcttttgatttataagggattttgccgatttcggcctattggttaaaaaatgagctgatttaacaaaaatttaacgcgaattaattctgtggaatgtgtgtcagttagggtgtggaaagtccccaggctccccagcaggcagaagtatgcaaagcatgcatctcaattagtcagcaaccaggtgtggaaagtccccaggctccccagcaggcagaagtatgcaaagcatgcatctcaattagtcagcaaccatagtcccgcccctaactccgcccatcccgcccctaactccgcccagttccgcccattctccgccccatggctgactaattttttttatttatgcagaggccgaggccgcctctgcctctgagctattccagaagtagtgaggaggcttttttggaggcctaggcttttgcaaaaagctcccgggagcttgtatatccattttcggatctgatcaagagacaggatgaggatcgtttcgcatgattgaacaagatggattgcacgcaggttctccggccgcttgggtggagaggctattcggctatgactgggcacaacagacaatcggctgctctgatgccgccgtgttccggctgtcagcgcaggggcgcccggttctttttgtcaagaccgacctgtccggtgccctgaatgaactgcaggacgaggcagcgcggctatcgtggctggccacgacgggcgttccttgcgcagctgtgctcgacgttgtcactgaagcgggaagggactggctgctattgggcgaagtgccggggcaggatctcctgtcatctcaccttgctcctgccgagaaagtatccatcatggctgatgcaatgcggcggctgcatacgcttgatccggctacctgcccattcgaccaccaagcgaaacatcgcatcgagcgagcacgtactcggatggaagccggtcttgtcgatcaggatgatctggacgaagagcatcaggggctcgcgccagccgaactgttcgccaggctcaaggcgcgcatgcccgacggcgaggatctcgtcgtgacccatggcgatgcctgcttgccgaatatcatggtggaaaatggccgcttttctggattcatcgactgtggccggctgggtgtggcggaccgctatcaggacatagcgttggctacccgtgatattgctgaagagcttggcggcgaatgggctgaccgcttcctcgtgctttacggtatcgccgctcccgattcgcagcgcatcgccttctatcgccttcttgacgagttcttctgagcgggactctggggttcgaaatgaccgaccaagcgacgcccaacctgccatcacgagatttcgattccaccgccgccttctatgaaaggttgggcttcggaatcgttttccgggacgccggctggatgatcctccagcgcggggatctcatgctggagttcttcgcccaccccaacttgtttattgcagcttataatggttacaaataaagcaatagcatcacaaatttcacaaataaagcatttttttcactgcattctagttgtggtttgtccaaactcatcaatgtatcttatcatgtctgtataccgtcgacctctagctagagcttggcgtaatcatggtcatagctgtttcctgtgtgaaattgttatccgctcacaattccacacaacatacgagccggaagcataaagtgtaaagcctggggtgcctaatgagtgagctaactcacattaattgcgttgcgctcactgcccgctttccagtcgggaaacctgtcgtgccagctgcattaatgaatcggccaacgcgcggggagaggcggtttgcgtattgggcgctcttccgcttcctcgctcactgactcgctgcgctcggtcgttcggctgcggcgagcggtatcagctcactcaaaggcggtaatacggttatccacagaatcaggggataacgcaggaaagaacatgtgagcaaaaggccagcaaaaggccaggaaccgtaaaaaggccgcgttgctggcgtttttccataggctccgcccccctgacgagcatcacaaaaatcgacgctcaagtcagaggtggcgaaacccgacaggactataaagataccaggcgtttccccctggaagctccctcgtgcgctctcctgttccgaccctgccgcttaccggatacctgtccgcctttctcccttcgggaagcgtggcgctttctcatagctcacgctgtaggtatctcagttcggtgtaggtcgttcgctccaagctgggctgtgtgcacgaaccccccgttcagcccgaccgctgcgccttatccggtaactatcgtcttgagtccaacccggtaagacacgacttatcgccactggcagcagccactggtaacaggattagcagagcgaggtatgtaggcggtgctacagagttcttgaagtggtggcctaactacggctacactagaagaacagtatttggtatctgcgctctgctgaagccagttaccttcggaaaaagagttggtagctcttgatccggcaaacaaaccaccgctggtagcggtggtttttttgtttgcaagcagcagattacgcgcagaaaaaaaggatctcaagaagatcctttgatcttttctacggggtctgacgctcagtggaacgaaaactcacgttaagggattttggtcatgagattatcaaaaaggatcttcacctagatccttttaaattaaaaatgaagttttaaatcaatctaaagtatatatgagtaaacttggtctgacagttaccaatgcttaatcagtgaggcacctatctcagcgatctgtctatttcgttcatccatagttgcctgactccccgtcgtgtagataactacgatacgggagggcttaccatctggccccagtgctgcaatgataccgcgagacccacgctcaccggctccagatttatcagcaataaaccagccagccggaagggccgagcgcagaagtggtcctgcaactttatccgcctccatccagtctattaattgttgccgggaagctagagtaagtagttcgccagttaatagtttgcgcaacgttgttgccattgctacaggcatcgtggtgtcacgctcgtcgtttggtatggcttcattcagctccggttcccaacgatcaaggcgagttacatgatcccccatgttgtgcaaaaaagcggttagctccttcggtcctccgatcgttgtcagaagtaagttggccgcagtgttatcactcatggttatggcagcactgcataattctcttactgtcatgccatccgtaagatgcttttctgtgactggtgagtactcaaccaagtcattctgagaatagtgtatgcggcgaccgagttgctcttgcccggcgtcaatacgggataataccgcgccacatagcagaactttaaaagtgctcatcattggaaaacgttcttcggggcgaaaactctcaaggatcttaccgctgttgagatccagttcgatgtaacccactcgtgcacccaactgatcttcagcatcttttactttcaccagcgtttctgggtgagcaaaaacaggaaggcaaaatgccgcaaaaaagggaataagggcgacacggaaatgttgaatactcatactcttcctttttcaatattattgaagcatttatcagggttattgtctcatgagcggatacatatttgaatgtatttagaaaaataaacaaataggggttccgcgcacatttccccgaaaagtgccacctgacgtc

SEQ ID NO: 34 - protein, 1270 aa, synthetic construct
  REGION 1..1270: note = Omicron BA2 spike hexapro
MFVFLVLLPLVSSQCVNLITRTQSYTNSFTRGVYYPDKVFRSSVLHSTQDLFLPFFSNVTWFHAIHVSGTNGTKRFDNPVLPFNDGVYFASTEKSNIIRGWIFGTTLDSKTQSLLIVNNATNVVIKVCEFQFCNDPFLDVYYHKNNKSWMESEFRVYSSANNCTFEYVSQPFLMDLEGKQGNFKNLREFVFKNIDGYFKIYSKHTPINLGRDLPQGFSALEPLVDLPIGINITRFQTLLALHRSYLTPGDSSSGWTAGAAAYYVGYLQPRTFLLKYNENGTITDAVDCALDPLSETKCTLKSFTVEKGIYQTSNFRVQPTESIVRFPNITNLCPFDEVFNATRFASVYAWNRKRISNCVADYSVLYNFAPFFAFKCYGVSPTKLNDLCFTNVYADSFVIRGNEVSQIAPGQTGNIADYNYKLPDDFTGCVIAWNSNKLDSKVGGNYNYLYRLFRKSNLKPFERDISTEIYQAGNKPCNGVAGFNCYFPLRSYGFRPTYGVGHQPYRVVVLSFELLHAPATVCGPKKSTNLVKNKCVNFNFNGLTGTGVLTESNKKFLPFQQFGRDIADTTDAVRDPQTLEILDITPCSFGGVSVITPGTNTSNQVAVLYQGVNCTEVPVAIHADQLTPTWRVYSTGSNVFQTRAGCLIGAEYVNNSYECDIPIGAGICASYQTQTKSHRRARSVASQSIIAYTMSLGAENSVAYSNNSIAIPTNFTISVTTEILPVSMTKTSVDCTMYICGDSTECSNLLLQYGSFCTQLKRALTGIAVEQDKNTQEVFAQVKQIYKTPPIKYFGGFNFSQILPDPSKPSKRSPIEDLLFNKVTLADAGFIKQYGDCLGDIAARDLICAQKFNGLTVLPPLLTDEMIAQYTSALLAGTITSGWTFGAGPALQIPFPMQMAYRFNGIGVTQNVLYENQKLIANQFNSAIGKIQDSLSSTPSALGKLQDVVNHNAQALNTLVKQLSSKFGAISSVLNDILSRLDPPEAEVQIDRLITGRLQSLQTYVTQQLIRAAEIRASANLAATKMSECVLGQSKRVDFCGKGYHLMSFPQSAPHGVVFLHVTYVPAQEKNFTTAPAICHDGKAHFPREGVFVSNGTHWFVTQRNFYEPQIITTDNTFVSGNCDVVIGIVNNTVYDPLQPELDSFKEELDKYFKNHTSPDVDLGDISGINASVVNIQKEIDRLNEVAKNLNESLIDLQELGKYEQYIKWPWYIWLGFIAGLIAIVMVTIMLCCMTSCCSCLKGCCSCGSCCKFDEDDSEPVLKGVKLHYT

SEQ ID NO: 35 - DNA, 9114 bp, synthetic construct
  misc_feature 1..9114: note = pZF57 Omicron BA.2 Spike Pseudovirus del 19
  source 1..9114: mol_type = other DNA
gacggatcgggagatctcccgatcccctatggtgcactctcagtacaatctgctctgatgccgcatagttaagccagtatctgctccctgcttgtgtgttggaggtcgctgagtagtgcgcgagcaaaatttaagctacaacaaggcaaggcttgaccgacaattgcatgaagaatctgcttagggttaggcgttttgcgctgcttcgcgatgtacgggccagatatacgcgttgacattgattattgactagttattaatagtaatcaattacggggtcattagttcatagcccatatatggagttccgcgttacataacttacggtaaatggcccgcctggctgaccgcccaacgacccccgcccattgacgtcaataatgacgtatgttcccatagtaacgccaatagggactttccattgacgtcaatgggtggagtatttacggtaaactgcccacttggcagtacatcaagtgtatcatatgccaagtacgccccctattgacgtcaatgacggtaaatggcccgcctggcattatgcccagtacatgaccttatgggactttcctacttggcagtacatctacgtattagtcatcgctattaccatggtgatgcggttttggcagtacatcaatgggcgtggatagcggtttgactcacggggatttccaagtctccaccccattgacgtcaatgggagtttgttttggcaccaaaatcaacgggactttccaaaatgtcgtaacaactccgccccattgacgcaaatgggcggtaggcgtgtacggtgggaggtctatataagcagagctctctggctaactagagaacccactgcttactggcttatcgaaattaatacgactcactatagggagacccaagctggctagccaccatgtttgtgttcctggtgctgctgccactggtgtccagccagtgtgtgaacctgatcaccaggacccaaagctacaccaactccttcaccaggggagtctactaccctgacaaggtgttcaggtcctctgtgctgcacagcacccaggacctgttcctgccattcttcagcaatgtgacctggttccatgccatccacgtgtctggcaccaatggcaccaagaggtttgacaaccctgtgctgccattcaatgatggagtctactttgccagcaccgagaagagcaacatcatcaggggctggatttttggcaccaccctggacagcaagacccagtccctgctgattgtgaacaatgccaccaatgtggtgattaaggtgtgtgagttccagttctgtaatgacccattcctggacgtgtactaccacaagaacaacaagtcctggatggagtctgagttcagggtctactcctctgccaacaactgtacctttgaatatgtgagccaaccattcctgatggacttggagggcaagcagggcaacttcaagaacctgagggagtttgtgttcaagaacattgatggctacttcaagatttacagcaaacacacaccaatcaacctgggcagagacctgccacagggcttctctgccttggaaccactggtggacctgccaattggcatcaacatcaccaggttccagaccctgctggctctgcacaggtcctacctgacacctggagactcctcctctggctggacagcaggagcagcagcctactatgtgggctacctccaaccaaggaccttcctgctgaaatacaatgagaatggcaccatcacagatgctgtggactgtgccctggacccactgtctgagaccaagtgtaccctgaaatccttcacagtggagaagggcatctaccagaccagcaacttcagggtccaaccaacagagagcattgtgaggtttccaaacatcaccaacctgtgtccatttgacgaggtgttcaacgccaccaggtttgcctctgtctatgcctggaacaggaagaggattagcaactgtgtggctgactactctgtgctctacaacttcgcccccttcttcgccttcaagtgttatggagtgagcccaaccaaactgaatgacctgtgtttcaccaatgtctatgctgactcctttgtgattaggggaaacgaggtgagccagattgcccctggacaaacaggcaacattgctgactacaactacaaactgcctgatgacttcacaggctgtgtgattgcctggaacagcaacaagctggacagcaaggtgggcggcaactacaactacctctacagactgttcaggaagagcaacctgaaaccatttgagagggacatcagcacagagatttaccaggctggcaacaagccatgtaatggagtggccggcttcaactgttactttccactccggtcctatggcttccggccaacctacggagtgggccaccaaccatacagggtggtggtgctgtcctttgaactgctccatgcccctgccacagtgtgtggaccaaagaagagcaccaacctggtgaagaacaagtgtgtgaacttcaacttcaatggactgaccggcacaggagtgctgacagagagcaacaagaagttcctgccattccaacagtttggcagggacattgctgacaccacagatgctgtgagggacccacagaccttggagattctggacatcacaccatgttcctttggaggagtgtctgtgattacacctggcaccaacaccagcaaccaggtggctgtgctctaccagggcgtgaactgtactgaggtgcctgtggctatccatgctgaccaacttacaccaacctggagggtctacagcacaggcagcaatgtgttccagaccagggctggctgtctgattggagcagagtacgtgaacaactcctatgagtgtgacatcccaattggagcaggcatctgtgcctcctaccagacccagaccaagagccacaggagggcaaggtctgtggcaagccagagcatcattgcctacacaatgagtctgggagcagagaactctgtggcttacagcaacaacagcattgccatcccaaccaacttcaccatctctgtgaccacagagattctgcctgtgagtatgaccaagacctctgtggactgtacaatgtatatctgtggagacagcacagagtgtagcaacctgctgctccaatatggctccttctgtacccaacttaagagggctctgacaggcattgctgtggaacaggacaagaacacccaggaggtgtttgcccaggtgaagcagatttacaagacacctccaatcaagtactttggaggcttcaacttcagccagattctgcctgacccaagcaagccaagcaagaggtccttcattgaggacctgctgttcaacaaggtgaccctggctgatgctggcttcatcaagcaatatggagactgtctgggagacattgctgccagggacctgatttgtgcccagaagttcaacggactgacagtgctgcctccactgctgacagatgagatgattgcccaatacacctctgccctgctggctggcaccatcacctctggctggacctttggagcaggagcagccctccaaatcccatttgctatgcagatggcttacaggttcaatggcattggagtgacccagaatgtgctctatgagaaccagaaactgattgccaaccagttcaactctgccattggcaagattcaggactccctgtccagcacagcctctgccctgggcaagctccaagatgtggtgaaccacaatgcccaggctctgaacaccctggtgaagcaactttccagcaagtttggagccatctcctctgtgctgaatgacatcctgagcagactggacaaggtggaggctgaggtccagattgacagactgattacaggcagactccaatccctccaaacctatgtgacccaacaacttatcagggctgctgagattagggcatctgccaacctggctgccaccaagatgagtgagtgtgtgctgggacaaagcaagagggtggacttctgtggcaagggctaccacctgatgagttttccacagtctgcccctcatggagtggtgttcctgcatgtgacctatgtgcctgcccaggagaagaacttcaccacagcccctgccatctgccatgatggcaaggctcactttccaagggagggagtgtttgtgagcaatggcacccactggtttgtgacccagaggaacttctatgaaccacagattatcaccacagacaacacctttgtgtctggcaactgtgatgtggtgattggcattgtgaacaacacagtctatgacccactccaacctgaactggactccttcaaggaggaactggacaaatacttcaagaaccacaccagccctgatgtggacctgggagacatctctggcatcaatgcctctgtggtgaacatccagaaggagattgacagactgaatgaggtggctaagaacctgaatgagtccctgattgacctccaagaactgggcaaatatgaacaatacatcaagtggccatggtacatctggctgggcttcattgctggactgattgccattgtgatggtgaccataatgctgtgttgtatgacctcctgttgttcctgtctgaaaggctgttgttcctgtggctcctgttgttgaggatccgagctcggtaccaagcttaagtttaaaccgctgatcagcctcgactgtgccttctagttgccagccatctgttgtttgcccctcccccgtgccttccttgaccctggaaggtgccactcccactgtcctttcctaataaaatgaggaaattgcatcgcattgtctgagtaggtgtcattctattctggggggtggggtggggcaggacagcaagggggaggattgggaagacaatagcaggcatgctggggatgcggtgggctctatggcttctgaggcggaaagaaccagctggggctctagggggtatccccacgcgccctgtagcggcgcattaagcgcggcgggtgtggtggttacgcgcagcgtgaccgctacacttgccagcgccctagcgcccgctcctttcgctttcttcccttcctttctcgccacgttcgccggctttccccgtcaagctctaaatcgggggctccctttagggttccgatttagtgctttacggcacctcgaccccaaaaaacttgattagggtgatggttcacgtagtgggccatcgccctgatagacggtttttcgccctttgacgttggagtccacgttctttaatagtggactcttgttccaaactggaacaacactcaaccctatctcggtctattcttttgatttataagggattttgccgatttcggcctattggttaaaaaatgagctgatttaacaaaaatttaacgcgaattaattctgtggaatgtgtgtcagttagggtgtggaaagtccccaggctccccagcaggcagaagtatgcaaagcatgcatctcaattagtcagcaaccaggtgtggaaagtccccaggctccccagcaggcagaagtatgcaaagcatgcatctcaattagtcagcaaccatagtcccgcccctaactccgcccatcccgcccctaactccgcccagttccgcccattctccgccccatggctgactaattttttttatttatgcagaggccgaggccgcctctgcctctgagctattccagaagtagtgaggaggcttttttggaggcctaggcttttgcaaaaagctcccgggagcttgtatatccattttcggatctgatcaagagacaggatgaggatcgtttcgcatgattgaacaagatggattgcacgcaggttctccggccgcttgggtggagaggctattcggctatgactgggcacaacagacaatcggctgctctgatgccgccgtgttccggctgtcagcgcaggggcgcccggttctttttgtcaagaccgacctgtccggtgccctgaatgaactgcaggacgaggcagcgcggctatcgtggctggccacgacgggcgttccttgcgcagctgtgctcgacgttgtcactgaagcgggaagggactggctgctattgggcgaagtgccggggcaggatctcctgtcatctcaccttgctcctgccgagaaagtatccatcatggctgatgcaatgcggcggctgcatacgcttgatccggctacctgcccattcgaccaccaagcgaaacatcgcatcgagcgagcacgtactcggatggaagccggtcttgtcgatcaggatgatctggacgaagagcatcaggggctcgcgccagccgaactgttcgccaggctcaaggcgcgcatgcccgacggcgaggatctcgtcgtgacccatggcgatgcctgcttgccgaatatcatggtggaaaatggccgcttttctggattcatcgactgtggccggctgggtgtggcggaccgctatcaggacatagcgttggctacccgtgatattgctgaagagcttggcggcgaatgggctgaccgcttcctcgtgctttacggtatcgccgctcccgattcgcagcgcatcgccttctatcgccttcttgacgagttcttctgagcgggactctggggttcgaaatgaccgaccaagcgacgcccaacctgccatcacgagatttcgattccaccgccgccttctatgaaaggttgggcttcggaatcgttttccgggacgccggctggatgatcctccagcgcggggatctcatgctggagttcttcgcccaccccaacttgtttattgcagcttataatggttacaaataaagcaatagcatcacaaatttcacaaataaagcatttttttcactgcattctagttgtggtttgtccaaactcatcaatgtatcttatcatgtctgtataccgtcgacctctagctagagcttggcgtaatcatggtcatagctgtttcctgtgtgaaattgttatccgctcacaattccacacaacatacgagccggaagcataaagtgtaaagcctggggtgcctaatgagtgagctaactcacattaattgcgttgcgctcactgcccgctttccagtcgggaaacctgtcgtgccagctgcattaatgaatcggccaacgcgcggggagaggcggtttgcgtattgggcgctcttccgcttcctcgctcactgactcgctgcgctcggtcgttcggctgcggcgagcggtatcagctcactcaaaggcggtaatacggttatccacagaatcaggggataacgcaggaaagaacatgtgagcaaaaggccagcaaaaggccaggaaccgtaaaaaggccgcgttgctggcgtttttccataggctccgcccccctgacgagcatcacaaaaatcgacgctcaagtcagaggtggcgaaacccgacaggactataaagataccaggcgtttccccctggaagctccctcgtgcgctctcctgttccgaccctgccgcttaccggatacctgtccgcctttctcccttcgggaagcgtggcgctttctcatagctcacgctgtaggtatctcagttcggtgtaggtcgttcgctccaagctgggctgtgtgcacgaaccccccgttcagcccgaccgctgcgccttatccggtaactatcgtcttgagtccaacccggtaagacacgacttatcgccactggcagcagccactggtaacaggattagcagagcgaggtatgtaggcggtgctacagagttcttgaagtggtggcctaactacggctacactagaagaacagtatttggtatctgcgctctgctgaagccagttaccttcggaaaaagagttggtagctcttgatccggcaaacaaaccaccgctggtagcggtggtttttttgtttgcaagcagcagattacgcgcagaaaaaaaggatctcaagaagatcctttgatcttttctacggggtctgacgctcagtggaacgaaaactcacgttaagggattttggtcatgagattatcaaaaaggatcttcacctagatccttttaaattaaaaatgaagttttaaatcaatctaaagtatatatgagtaaacttggtctgacagttaccaatgcttaatcagtgaggcacctatctcagcgatctgtctatttcgttcatccatagttgcctgactccccgtcgtgtagataactacgatacgggagggcttaccatctggccccagtgctgcaatgataccgcgagacccacgctcaccggctccagatttatcagcaataaaccagccagccggaagggccgagcgcagaagtggtcctgcaactttatccgcctccatccagtctattaattgttgccgggaagctagagtaagtagttcgccagttaatagtttgcgcaacgttgttgccattgctacaggcatcgtggtgtcacgctcgtcgtttggtatggcttcattcagctccggttcccaacgatcaaggcgagttacatgatcccccatgttgtgcaaaaaagcggttagctccttcggtcctccgatcgttgtcagaagtaagttggccgcagtgttatcactcatggttatggcagcactgcataattctcttactgtcatgccatccgtaagatgcttttctgtgactggtgagtactcaaccaagtcattctgagaatagtgtatgcggcgaccgagttgctcttgcccggcgtcaatacgggataataccgcgccacatagcagaactttaaaagtgctcatcattggaaaacgttcttcggggcgaaaactctcaaggatcttaccgctgttgagatccagttcgatgtaacccactcgtgcacccaactgatcttcagcatcttttactttcaccagcgtttctgggtgagcaaaaacaggaaggcaaaatgccgcaaaaaagggaataagggcgacacggaaatgttgaatactcatactcttcctttttcaatattattgaagcatttatcagggttattgtctcatgagcggatacatatttgaatgtatttagaaaaataaacaaataggggttccgcgcacatttccccgaaaagtgccacctgacgtc

SEQ ID NO: 36 - DNA, 9114 bp, synthetic construct
  misc_feature 1..9114: note = pZF89 Omicron BA.2.12.1 Spike Pseudovirus del19
  source 1..9114: mol_type = other DNA
gacggatcgggagatctcccgatcccctatggtgcactctcagtacaatctgctctgatgccgcatagttaagccagtatctgctccctgcttgtgtgttggaggtcgctgagtagtgcgcgagcaaaatttaagctacaacaaggcaaggcttgaccgacaattgcatgaagaatctgcttagggttaggcgttttgcgctgcttcgcgatgtacgggccagatatacgcgttgacattgattattgactagttattaatagtaatcaattacggggtcattagttcatagcccatatatggagttccgcgttacataacttacggtaaatggcccgcctggctgaccgcccaacgacccccgcccattgacgtcaataatgacgtatgttcccatagtaacgccaatagggactttccattgacgtcaatgggtggagtatttacggtaaactgcccacttggcagtacatcaagtgtatcatatgccaagtacgccccctattgacgtcaatgacggtaaatggcccgcctggcattatgcccagtacatgaccttatgggactttcctacttggcagtacatctacgtattagtcatcgctattaccatggtgatgcggttttggcagtacatcaatgggcgtggatagcggtttgactcacggggatttccaagtctccaccccattgacgtcaatgggagtttgttttggcaccaaaatcaacgggactttccaaaatgtcgtaacaactccgccccattgacgcaaatgggcggtaggcgtgtacggtgggaggtctatataagcagagctctctggctaactagagaacccactgcttactggcttatcgaaattaatacgactcactatagggagacccaagctggctagccaccatgtttgtgttcctggtgctgctgccactggtgtccagccagtgtgtgaacctgatcaccaggacccaaagctacaccaactccttcaccaggggagtctactaccctgacaaggtgttcaggtcctctgtgctgcacagcacccaggacctgttcctgccattcttcagcaatgtgacctggttccatgccatccacgtgtctggcaccaatggcaccaagaggtttgacaaccctgtgctgccattcaatgatggagtctactttgccagcaccgagaagagcaacatcatcaggggctggatttttggcaccaccctggacagcaagacccagtccctgctgattgtgaacaatgccaccaatgtggtgattaaggtgtgtgagttccagttctgtaatgacccattcctggacgtgtactaccacaagaacaacaagtcctggatggagtctgagttcagggtctactcctctgccaacaactgtacctttgaatatgtgagccaaccattcctgatggacttggagggcaagcagggcaacttcaagaacctgagggagtttgtgttcaagaacattgatggctacttcaagatttacagcaaacacacaccaatcaacctgggcagagacctgccacagggcttctctgccttggaaccactggtggacctgccaattggcatcaacatcaccaggttccagaccctgctggctctgcacaggtcctacctgacacctggagactcctcctctggctggacagcaggagcagcagcctactatgtgggctacctccaaccaaggaccttcctgctgaaatacaatgagaatggcaccatcacagatgctgtggactgtgccctggacccactgtctgagaccaagtgtaccctgaaatccttcacagtggagaagggcatctaccagaccagcaacttcagggtccaaccaacagagagcattgtgaggtttccaaacatcaccaacctgtgtccatttgacgaggtgttcaacgccaccaggtttgcctctgtctatgcctggaacaggaagaggattagcaactgtgtggctgactactctgtgctctacaacttcgcccccttcttcgccttcaagtgttatggagtgagcccaaccaaactgaatgacctgtgtttcaccaatgtctatgctgactcctttgtgattaggggaaacgaggtgagccagattgcccctggacaaacaggcaacattgctgactacaactacaaactgcctgatgacttcacaggctgtgtgattgcctggaacagcaacaagctggacagcaaggtgggcggcaactacaactaccagtacagactgttcaggaagagcaacctgaaaccatttgagagggacatcagcacagagatttaccaggctggcaacaagccatgtaatggagtggccggcttcaactgttactttccactccggtcctatggcttccggccaacctacggagtgggccaccaaccatacagggtggtggtgctgtcctttgaactgctccatgcccctgccacagtgtgtggaccaaagaagagcaccaacctggtgaagaacaagtgtgtgaacttcaacttcaatggactgaccggcacaggagtgctgacagagagcaacaagaagttcctgccattccaacagtttggcagggacattgctgacaccacagatgctgtgagggacccacagaccttggagattctggacatcacaccatgttcctttggaggagtgtctgtgattacacctggcaccaacaccagcaaccaggtggctgtgctctaccagggcgtgaactgtactgaggtgcctgtggctatccatgctgaccaacttacaccaacctggagggtctacagcacaggcagcaatgtgttccagaccagggctggctgtctgattggagcagagtacgtgaacaactcctatgagtgtgacatcccaattggagcaggcatctgtgcctcctaccagacccagaccaagagccacaggagggcaaggtctgtggcaagccagagcatcattgcctacacaatgagtctgggagcagagaacctggtggcttacagcaacaacagcattgccatcccaaccaacttcaccatctctgtgaccacagagattctgcctgtgagtatgaccaagacctctgtggactgtacaatgtatatctgtggagacagcacagagtgtagcaacctgctgctccaatatggctccttctgtacccaacttaagagggctctgacaggcattgctgtggaacaggacaagaacacccaggaggtgtttgcccaggtgaagcagatttacaagacacctccaatcaagtactttggaggcttcaacttcagccagattctgcctgacccaagcaagccaagcaagaggtccttcattgaggacctgctgttcaacaaggtgaccctggctgatgctggcttcatcaagcaatatggagactgtctgggagacattgctgccagggacctgatttgtgcccagaagttcaacggactgacagtgctgcctccactgctgacagatgagatgattgcccaatacacctctgccctgctggctggcaccatcacctctggctggacctttggagcaggagcagccctccaaatcccatttgctatgcagatggcttacaggttcaatggcattggagtgacccagaatgtgctctatgagaaccagaaactgattgccaaccagttcaactctgccattggcaagattcaggactccctgtccagcacagcctctgccctgggcaagctccaagatgtggtgaaccacaatgcccaggctctgaacaccctggtgaagcaactttccagcaagtttggagccatctcctctgtgctgaatgacatcctgagcagactggacaaggtggaggctgaggtccagattgacagactgattacaggcagactccaatccctccaaacctatgtgacccaacaacttatcagggctgctgagattagggcatctgccaacctggctgccaccaagatgagtgagtgtgtgctgggacaaagcaagagggtggacttctgtggcaagggctaccacctgatgagttttccacagtctgcccctcatggagtggtgttcctgcatgtgacctatgtgcctgcccaggagaagaacttcaccacagcccctgccatctgccatgatggcaaggctcactttccaagggagggagtgtttgtgagcaatggcacccactggtttgtgacccagaggaacttctatgaaccacagattatcaccacagacaacacctttgtgtctggcaactgtgatgtggtgattggcattgtgaacaacacagtctatgacccactccaacctgaactggactccttcaaggaggaactggacaaatacttcaagaaccacaccagccctgatgtggacctgggagacatctctggcatcaatgcctctgtggtgaacatccagaaggagattgacagactgaatgaggtggctaagaacctgaatgagtccctgattgacctccaagaactgggcaaatatgaacaatacatcaagtggccatggtacatctggctgggcttcattgctggactgattgccattgtgatggtgaccataatgctgtgttgtatgacctcctgttgttcctgtctgaaaggctgttgttcctgtggctcctgttgttgaggatccgagctcggtaccaagcttaagtttaaaccgctgatcagcctcgactgtgccttctagttgccagccatctgttgtttgcccctcccccgtgccttccttgaccctggaaggtgccactcccactgtcctttcctaataaaatgaggaaattgcatcgcattgtctgagtaggtgtcattctattctggggggtggggtggggcaggacagcaagggggaggattgggaagacaatagcaggcatgctggggatgcggtgggctctatggcttctgaggcggaaagaaccagctggggctctagggggtatccccacgcgccctgtagcggcgcattaagcgcggcgggtgtggtggttacgcgcagcgtgaccgctacacttgccagcgccctagcgcccgctcctttcgctttcttcccttcctttctcgccacgttcgccggctttccccgtcaagctctaaatcgggggctccctttagggttccgatttagtgctttacggcacctcgaccccaaaaaacttgattagggtgatggttcacgtagtgggccatcgccctgatagacggtttttcgccctttgacgttggagtccacgttctttaatagtggactcttgttccaaactggaacaacactcaaccctatctcggtctattcttttgatttataagggattttgccgatttcggcctattggttaaaaaatgagctgatttaacaaaaatttaacgcgaattaattctgtggaatgtgtgtcagttagggtgtggaaagtccccaggctccccagcaggcagaagtatgcaaagcatgcatctcaattagtcagcaaccaggtgtggaaagtccccaggctccccagcaggcagaagtatgcaaagcatgcatctcaattagtcagcaaccatagtcccgcccctaactccgcccatcccgcccctaactccgcccagttccgcccattctccgccccatggctgactaattttttttatttatgcagaggccgaggccgcctctgcctctgagctattccagaagtagtgaggaggcttttttggaggcctaggcttttgcaaaaagctcccgggagcttgtatatccattttcggatctgatcaagagacaggatgaggatcgtttcgcatgattgaacaagatggattgcacgcaggttctccggccgcttgggtggagaggctattcggctatgactgggcacaacagacaatcggctgctctgatgccgccgtgttccggctgtcagcgcaggggcgcccggttctttttgtcaagaccgacctgtccggtgccctgaatgaactgcaggacgaggcagcgcggctatcgtggctggccacgacgggcgttccttgcgcagctgtgctcgacgttgtcactgaagcgggaagggactggctgctattgggcgaagtgccggggcaggatctcctgtcatctcaccttgctcctgccgagaaagtatccatcatggctgatgcaatgcggcggctgcatacgcttgatccggctacctgcccattcgaccaccaagcgaaacatcgcatcgagcgagcacgtactcggatggaagccggtcttgtcgatcaggatgatctggacgaagagcatcaggggctcgcgccagccgaactgttcgccaggctcaaggcgcgcatgcccgacggcgaggatctcgtcgtgacccatggcgatgcctgcttgccgaatatcatggtggaaaatggccgcttttctggattcatcgactgtggccggctgggtgtggcggaccgctatcaggacatagcgttggctacccgtgatattgctgaagagcttggcggcgaatgggctgaccgcttcctcgtgctttacggtatcgccgctcccgattcgcagcgcatcgccttctatcgccttcttgacgagttcttctgagcgggactctggggttcgaaatgaccgaccaagcgacgcccaacctgccatcacgagatttcgattccaccgccgccttctatgaaaggttgggcttcggaatcgttttccgggacgccggctggatgatcctccagcgcggggatctcatgctggagttcttcgcccaccccaacttgtttattgcagcttataatggttacaaataaagcaatagcatcacaaatttcacaaataaagcatttttttcactgcattctagttgtggtttgtccaaactcatcaatgtatcttatcatgtctgtataccgtcgacctctagctagagcttggcgtaatcatggtcatagctgtttcctgtgtgaaattgttatccgctcacaattccacacaacatacgagccggaagcataaagtgtaaagcctggggtgcctaatgagtgagctaactcacattaattgcgttgcgctcactgcccgctttccagtcgggaaacctgtcgtgccagctgcattaatgaatcggccaacgcgcggggagaggcggtttgcgtattgggcgctcttccgcttcctcgctcactgactcgctgcgctcggtcgttcggctgcggcgagcggtatcagctcactcaaaggcggtaatacggttatccacagaatcaggggataacgcaggaaagaacatgtgagcaaaaggccagcaaaaggccaggaaccgtaaaaaggccgcgttgctggcgtttttccataggctccgcccccctgacgagcatcacaaaaatcgacgctcaagtcagaggtggcgaaacccgacaggactataaagataccaggcgtttccccctggaagctccctcgtgcgctctcctgttccgaccctgccgcttaccggatacctgtccgcctttctcccttcgggaagcgtggcgctttctcatagctcacgctgtaggtatctcagttcggtgtaggtcgttcgctccaagctgggctgtgtgcacgaaccccccgttcagcccgaccgctgcgccttatccggtaactatcgtcttgagtccaacccggtaagacacgacttatcgccactggcagcagccactggtaacaggattagcagagcgaggtatgtaggcggtgctacagagttcttgaagtggtggcctaactacggctacactagaagaacagtatttggtatctgcgctctgctgaagccagttaccttcggaaaaagagttggtagctcttgatccggcaaacaaaccaccgctggtagcggtggtttttttgtttgcaagcagcagattacgcgcagaaaaaaaggatctcaagaagatcctttgatcttttctacggggtctgacgctcagtggaacgaaaactcacgttaagggattttggtcatgagattatcaaaaaggatcttcacctagatccttttaaattaaaaatgaagttttaaatcaatctaaagtatatatgagtaaacttggtctgacagttaccaatgcttaatcagtgaggcacctatctcagcgatctgtctatttcgttcatccatagttgcctgactccccgtcgtgtagataactacgatacgggagggcttaccatctggccccagtgctgcaatgataccgcgagacccacgctcaccggctccagatttatcagcaataaaccagccagccggaagggccgagcgcagaagtggtcctgcaactttatccgcctccatccagtctattaattgttgccgggaagctagagtaagtagttcgccagttaatagtttgcgcaacgttgttgccattgctacaggcatcgtggtgtcacgctcgtcgtttggtatggcttcattcagctccggttcccaacgatcaaggcgagttacatgatcccccatgttgtgcaaaaaagcggttagctccttcggtcctccgatcgttgtcagaagtaagttggccgcagtgttatcactcatggttatggcagcactgcataattctcttactgtcatgccatccgtaagatgcttttctgtgactggtgagtactcaaccaagtcattctgagaatagtgtatgcggcgaccgagttgctcttgcccggcgtcaatacgggataataccgcgccacatagcagaactttaaaagtgctcatcattggaaaacgttcttcggggcgaaaactctcaaggatcttaccgctgttgagatccagttcgatgtaacccactcgtgcacccaactgatcttcagcatcttttactttcaccagcgtttctgggtgagcaaaaacaggaaggcaaaatgccgcaaaaaagggaataagggcgacacggaaatgttgaatactcatactcttcctttttcaatattattgaagcatttatcagggttattgtctcatgagcggatacatatttgaatgtatttagaaaaataaacaaataggggttccgcgcacatttccccgaaaagtgccacctgacgtc

SEQ ID NO: 37 - DNA, 9108 bp, synthetic construct
  misc_feature 1..9108: note = pZF90 Omicron BA.4 Spike Pseudovirus del19
  source 1..9108: mol_type = other DNA
gacggatcgggagatctcccgatcccctatggtgcactctcagtacaatctgctctgatgccgcatagttaagccagtatctgctccctgcttgtgtgttggaggtcgctgagtagtgcgcgagcaaaatttaagctacaacaaggcaaggcttgaccgacaattgcatgaagaatctgcttagggttaggcgttttgcgctgcttcgcgatgtacgggccagatatacgcgttgacattgattattgactagttattaatagtaatcaattacggggtcattagttcatagcccatatatggagttccgcgttacataacttacggtaaatggcccgcctggctgaccgcccaacgacccccgcccattgacgtcaataatgacgtatgttcccatagtaacgccaatagggactttccattgacgtcaatgggtggagtatttacggtaaactgcccacttggcagtacatcaagtgtatcatatgccaagtacgccccctattgacgtcaatgacggtaaatggcccgcctggcattatgcccagtacatgaccttatgggactttcctacttggcagtacatctacgtattagtcatcgctattaccatggtgatgcggttttggcagtacatcaatgggcgtggatagcggtttgactcacggggatttccaagtctccaccccattgacgtcaatgggagtttgttttggcaccaaaatcaacgggactttccaaaatgtcgtaacaactccgccccattgacgcaaatgggcggtaggcgtgtacggtgggaggtctatataagcagagctctctggctaactagagaacccactgcttactggcttatcgaaattaatacgactcactatagggagacccaagctggctagccaccatgtttgtgttcctggtgctgctgccactggtgtccagccagtgtgtgaacctgatcaccaggacccaaagctacaccaactccttcaccaggggagtctactaccctgacaaggtgttcaggtcctctgtgctgcacagcacccaggacctgttcctgccattcttcagcaatgtgacctggttccatgccatctctggcaccaatggcaccaagaggtttgacaaccctgtgctgccattcaatgatggagtctactttgccagcaccgagaagagcaacatcatcaggggctggatttttggcaccaccctggacagcaagacccagtccctgctgattgtgaacaatgccaccaatgtggtgattaaggtgtgtgagttccagttctgtaatgacccattcctggacgtgtactaccacaagaacaacaagtcctggatggagtctgagttcagggtctactcctctgccaacaactgtacctttgaatatgtgagccaaccattcctgatggacttggagggcaagcagggcaacttcaagaacctgagggagtttgtgttcaagaacattgatggctacttcaagatttacagcaaacacacaccaatcaacctgggcagagacctgccacagggcttctctgccttggaaccactggtggacctgccaattggcatcaacatcaccaggttccagaccctgctggctctgcacaggtcctacctgacacctggagactcctcctctggctggacagcaggagcagcagcctactatgtgggctacctccaaccaaggaccttcctgctgaaatacaatgagaatggcaccatcacagatgctgtggactgtgccctggacccactgtctgagaccaagtgtaccctgaaatccttcacagtggagaagggcatctaccagaccagcaacttcagggtccaaccaacagagagcattgtgaggtttccaaacatcaccaacctgtgtccatttgacgaggtgttcaacgccaccaggtttgcctctgtctatgcctggaacaggaagaggattagcaactgtgtggctgactactctgtgctctacaacttcgcccccttcttcgccttcaagtgttatggagtgagcccaaccaaactgaatgacctgtgtttcaccaatgtctatgctgactcctttgtgattaggggaaacgaggtgagccagattgcccctggacaaacaggcaacattgctgactacaactacaaactgcctgatgacttcacaggctgtgtgattgcctggaacagcaacaagctggacagcaaggtgggcggcaactacaactacagatacagactgttcaggaagagcaacctgaaaccatttgagagggacatcagcacagagatttaccaggctggcaacaagccatgtaatggagtggccggcgtgaactgttactttccactccagtcctatggcttccggccaacctacggagtgggccaccaaccatacagggtggtggtgctgtcctttgaactgctccatgcccctgccacagtgtgtggaccaaagaagagcaccaacctggtgaagaacaagtgtgtgaacttcaacttcaatggactgaccggcacaggagtgctgacagagagcaacaagaagttcctgccattccaacagtttggcagggacattgctgacaccacagatgctgtgagggacccacagaccttggagattctggacatcacaccatgttcctttggaggagtgtctgtgattacacctggcaccaacaccagcaaccaggtggctgtgctctaccagggcgtgaactgtactgaggtgcctgtggctatccatgctgaccaacttacaccaacctggagggtctacagcacaggcagcaatgtgttccagaccagggctggctgtctgattggagcagagtacgtgaacagctcctatgagtgtgacatcccaattggagcaggcatctgtgcctcctaccagacccagaccaagagccacaggagggcaaggtctgtggcaagccagagcatcattgcctacacaatgagtctgggagcagagaactctgtggcttacagcaacaacagcattgccatcccaaccaacttcaccatctctgtgaccacagagattctgcctgtgagtatgaccaagacctctgtggactgtacaatgtatatctgtggagacagcacagagtgtagcaacctgctgctccaatatggctccttctgtacccaacttaagagggctctgacaggcattgctgtggaacaggacaagaacacccaggaggtgtttgcccaggtgaagcagatttacaagacacctccaatcaagtactttggaggcttcaacttcagccagattctgcctgacccaagcaagccaagcaagaggtccttcattgaggacctgctgttcaacaaggtgaccctggctgatgctggcttcatcaagcaatatggagactgtctgggagacattgctgccagggacctgatttgtgcccagaagttcaacggactgacagtgctgcctccactgctgacagatgagatgattgcccaatacacctctgccctgctggctggcaccatcacctctggctggacctttggagcaggagcagccctccaaatcccatttgctatgcagatggcttacaggttcaatggcattggagtgacccagaatgtgctctatgagaaccagaaactgattgccaaccagttcaactctgccattggcaagattcaggactccctgtccagcacagcctctgccctgggcaagctccaagatgtggtgaaccacaatgcccaggctctgaacaccctggtgaagcaactttccagcaagtttggagccatctcctctgtgctgaatgacatcctgagcagactggacaaggtggaggctgaggtccagattgacagactgattacaggcagactccaatccctccaaacctatgtgacccaacaacttatcagggctgctgagattagggcatctgccaacctggctgccaccaagatgagtgagtgtgtgctgggacaaagcaagagggtggacttctgtggcaagggctaccacctgatgagttttccacagtctgcccctcatggagtggtgttcctgcatgtgacctatgtgcctgcccaggagaagaacttcaccacagcccctgccatctgccatgatggcaaggctcactttccaagggagggagtgtttgtgagcaatggcacccactggtttgtgacccagaggaacttctatgaaccacagattatcaccacagacaacacctttgtgtctggcaactgtgatgtggtgattggcattgtgaacaacacagtctatgacccactccaacctgaactggactccttcaaggaggaactggacaaatacttcaagaaccacaccagccctgatgtggacctgggagacatctctggcatcaatgcctctgtggtgaacatccagaaggagattgacagactgaatgaggtggctaagaacctgaatgagtccctgattgacctccaagaactgggcaaatatgaacaatacatcaagtggccatggtacatctggctgggcttcattgctggactgattgccattgtgatggtgaccataatgctgtgttgtatgacctcctgttgttcctgtctgaaaggctgttgttcctgtggctcctgttgttgaggatccgagctcggtaccaagcttaagtttaaaccgctgatcagcctcgactgtgccttctagttgccagccatctgttgtttgcccctcccccgtgccttccttgaccctggaaggtgccactcccactgtcctttcctaataaaatgaggaaattgcatcgcattgtctgagtaggtgtcattctattctggggggtggggtggggcaggacagcaagggggaggattgggaagacaatagcaggcatgctggggatgcggtgggctctatggcttctgaggcggaaagaaccagctggggctctagggggtatccccacgcgccctgtagcggcgcattaagcgcggcgggtgtggtggttacgcgcagcgtgaccgctacacttgccagcgccctagcgcccgctcctttcgctttcttcccttcctttctcgccacgttcgccggctttccccgtcaagctctaaatcgggggctccctttagggttccgatttagtgctttacggcacctcgaccccaaaaaacttgattagggtgatggttcacgtagtgggccatcgccctgatagacggtttttcgccctttgacgttggagtccacgttctttaatagtggactcttgttccaaactggaacaacactcaaccctatctcggtctattcttttgatttataagggattttgccgatttcggcctattggttaaaaaatgagctgatttaacaaaaatttaacgcgaattaattctgtggaatgtgtgtcagttagggtgtggaaagtccccaggctccccagcaggcagaagtatgcaaagcatgcatctcaattagtcagcaaccaggtgtggaaagtccccaggctccccagcaggcagaagtatgcaaagcatgcatctcaattagtcagcaaccatagtcccgcccctaactccgcccatcccgcccctaactccgcccagttccgcccattctccgccccatggctgactaattttttttatttatgcagaggccgaggccgcctctgcctctgagctattccagaagtagtgaggaggcttttttggaggcctaggcttttgcaaaaagctcccgggagcttgtatatccattttcggatctgatcaagagacaggatgaggatcgtttcgcatgattgaacaagatggattgcacgcaggttctccggccgcttgggtggagaggctattcggctatgactgggcacaacagacaatcggctgctctgatgccgccgtgttccggctgtcagcgcaggggcgcccggttctttttgtcaagaccgacctgtccggtgccctgaatgaactgcaggacgaggcagcgcggctatcgtggctggccacgacgggcgttccttgcgcagctgtgctcgacgttgtcactgaagcgggaagggactggctgctattgggcgaagtgccggggcaggatctcctgtcatctcaccttgctcctgccgagaaagtatccatcatggctgatgcaatgcggcggctgcatacgcttgatccggctacctgcccattcgaccaccaagcgaaacatcgcatcgagcgagcacgtactcggatggaagccggtcttgtcgatcaggatgatctggacgaagagcatcaggggctcgcgccagccgaactgttcgccaggctcaaggcgcgcatgcccgacggcgaggatctcgtcgtgacccatggcgatgcctgcttgccgaatatcatggtggaaaatggccgcttttctggattcatcgactgtggccggctgggtgtggcggaccgctatcaggacatagcgttggctacccgtgatattgctgaagagcttggcggcgaatgggctgaccgcttcctcgtgctttacggtatcgccgctcccgattcgcagcgcatcgccttctatcgccttcttgacgagttcttctgagcgggactctggggttcgaaatgaccgaccaagcgacgcccaacctgccatcacgagatttcgattccaccgccgccttctatgaaaggttgggcttcggaatcgttttccgggacgccggctggatgatcctccagcgcggggatctcatgctggagttcttcgcccaccccaacttgtttattgcagcttataatggttacaaataaagcaatagcatcacaaatttcacaaataaagcatttttttcactgcattctagttgtggtttgtccaaactcatcaatgtatcttatcatgtctgtataccgtcgacctctagctagagcttggcgtaatcatggtcatagctgtttcctgtgtgaaattgttatccgctcacaattccacacaacatacgagccggaagcataaagtgtaaagcctggggtgcctaatgagtgagctaactcacattaattgcgttgcgctcactgcccgctttccagtcgggaaacctgtcgtgccagctgcattaatgaatcggccaacgcgcggggagaggcggtttgcgtattgggcgctcttccgcttcctcgctcactgactcgctgcgctcggtcgttcggctgcggcgagcggtatcagctcactcaaaggcggtaatacggttatccacagaatcaggggataacgcaggaaagaacatgtgagcaaaaggccagcaaaaggccaggaaccgtaaaaaggccgcgttgctggcgtttttccataggctccgcccccctgacgagcatcacaaaaatcgacgctcaagtcagaggtggcgaaacccgacaggactataaagataccaggcgtttccccctggaagctccctcgtgcgctctcctgttccgaccctgccgcttaccggatacctgtccgcctttctcccttcgggaagcgtggcgctttctcatagctcacgctgtaggtatctcagttcggtgtaggtcgttcgctccaagctgggctgtgtgcacgaaccccccgttcagcccgaccgctgcgccttatccggtaactatcgtcttgagtccaacccggtaagacacgacttatcgccactggcagcagccactggtaacaggattagcagagcgaggtatgtaggcggtgctacagagttcttgaagtggtggcctaactacggctacactagaagaacagtatttggtatctgcgctctgctgaagccagttaccttcggaaaaagagttggtagctcttgatccggcaaacaaaccaccgctggtagcggtggtttttttgtttgcaagcagcagattacgcgcagaaaaaaaggatctcaagaagatcctttgatcttttctacggggtctgacgctcagtggaacgaaaactcacgttaagggattttggtcatgagattatcaaaaaggatcttcacctagatccttttaaattaaaaatgaagttttaaatcaatctaaagtatatatgagtaaacttggtctgacagttaccaatgcttaatcagtgaggcacctatctcagcgatctgtctatttcgttcatccatagttgcctgactccccgtcgtgtagataactacgatacgggagggcttaccatctggccccagtgctgcaatgataccgcgagacccacgctcaccggctccagatttatcagcaataaaccagccagccggaagggccgagcgcagaagtggtcctgcaactttatccgcctccatccagtctattaattgttgccgggaagctagagtaagtagttcgccagttaatagtttgcgcaacgttgttgccattgctacaggcatcgtggtgtcacgctcgtcgtttggtatggcttcattcagctccggttcccaacgatcaaggcgagttacatgatcccccatgttgtgcaaaaaagcggttagctccttcggtcctccgatcgttgtcagaagtaagttggccgcagtgttatcactcatggttatggcagcactgcataattctcttactgtcatgccatccgtaagatgcttttctgtgactggtgagtactcaaccaagtcattctgagaatagtgtatgcggcgaccgagttgctcttgcccggcgtcaatacgggataataccgcgccacatagcagaactttaaaagtgctcatcattggaaaacgttcttcggggcgaaaactctcaaggatcttaccgctgttgagatccagttcgatgtaacccactcgtgcacccaactgatcttcagcatcttttactttcaccagcgtttctgggtgagcaaaaacaggaaggcaaaatgccgcaaaaaagggaataagggcgacacggaaatgttgaatactcatactcttcctttttcaatattattgaagcatttatcagggttattgtctcatgagcggatacatatttgaatgtatttagaaaaataaacaaataggggttccgcgcacatttccccgaaaagtgccacctgacgtc

SEQ ID NO: 38 - DNA, 9123 bp, synthetic construct
  misc_feature 1..9123: note = pVP24 pcDNA3.1 Spike del19
  source 1..9123: mol_type = other DNA
gacggatcgggagatctcccgatcccctatggtgcactctcagtacaatctgctctgatgccgcatagttaagccagtatctgctccctgcttgtgtgttggaggtcgctgagtagtgcgcgagcaaaatttaagctacaacaaggcaaggcttgaccgacaattgcatgaagaatctgcttagggttaggcgttttgcgctgcttcgcgatgtacgggccagatatacgcgttgacattgattattgactagttattaatagtaatcaattacggggtcattagttcatagcccatatatggagttccgcgttacataacttacggtaaatggcccgcctggctgaccgcccaacgacccccgcccattgacgtcaataatgacgtatgttcccatagtaacgccaatagggactttccattgacgtcaatgggtggagtatttacggtaaactgcccacttggcagtacatcaagtgtatcatatgccaagtacgccccctattgacgtcaatgacggtaaatggcccgcctggcattatgcccagtacatgaccttatgggactttcctacttggcagtacatctacgtattagtcatcgctattaccatggtgatgcggttttggcagtacatcaatgggcgtggatagcggtttgactcacggggatttccaagtctccaccccattgacgtcaatgggagtttgttttggcaccaaaatcaacgggactttccaaaatgtcgtaacaactccgccccattgacgcaaatgggcggtaggcgtgtacggtgggaggtctatataagcagagctctctggctaactagagaacccactgcttactggcttatcgaaattaatacgactcactatagggagacccaagctggctagccaccatgtttgtgttcctggtgctgctgccactggtgtccagccagtgtgtgaacctgaccaccaggacccaacttcctcctgcctacaccaactccttcaccaggggagtctactaccctgacaaggtgttcaggtcctctgtgctgcacagcacccaggacctgttcctgccattcttcagcaatgtgacctggttccatgccatccatgtgtctggcaccaatggcaccaagaggtttgacaaccctgtgctgccattcaatgatggagtctactttgccagcacagagaagagcaacatcatcaggggctggatttttggcaccaccctggacagcaagacccagtccctgctgattgtgaacaatgccaccaatgtggtgattaaggtgtgtgagttccagttctgtaatgacccattcctgggagtctactaccacaagaacaacaagtcctggatggagtctgagttcagggtctactcctctgccaacaactgtacctttgaatatgtgagccaaccattcctgatggacttggagggcaagcagggcaacttcaagaacctgagggagtttgtgttcaagaacattgatggctacttcaagatttacagcaaacacacaccaatcaacctggtgagggacctgccacagggcttctctgccttggaaccactggtggacctgccaattggcatcaacatcaccaggttccagaccctgctggctctgcacaggtcctacctgacacctggagactcctcctctggctggacagcaggagcagcagcctactatgtgggctacctccaaccaaggaccttcctgctgaaatacaatgagaatggcaccatcacagatgctgtggactgtgccctggacccactgtctgagaccaagtgtaccctgaaatccttcacagtggagaagggcatctaccagaccagcaacttcagggtccaaccaacagagagcattgtgaggtttccaaacatcaccaacctgtgtccatttggagaggtgttcaatgccaccaggtttgcctctgtctatgcctggaacaggaagaggattagcaactgtgtggctgactactctgtgctctacaactctgcctccttcagcaccttcaagtgttatggagtgagcccaaccaaactgaatgacctgtgtttcaccaatgtctatgctgactcctttgtgattaggggagatgaggtgagacagattgcccctggacaaacaggcaagattgctgactacaactacaaactgcctgatgacttcacaggctgtgtgattgcctggaacagcaacaacctggacagcaaggtgggaggcaactacaactacctctacagactgttcaggaagagcaacctgaaaccatttgagagggacatcagcacagagatttaccaggctggcagcacaccatgtaatggagtggagggcttcaactgttactttccactccaatcctatggcttccaaccaaccaatggagtgggctaccaaccatacagggtggtggtgctgtcctttgaactgctccatgcccctgccacagtgtgtggaccaaagaagagcaccaacctggtgaagaacaagtgtgtgaacttcaacttcaatggactgacaggcacaggagtgctgacagagagcaacaagaagttcctgccattccaacagtttggcagggacattgctgacaccacagatgctgtgagggacccacagaccttggagattctggacatcacaccatgttcctttggaggagtgtctgtgattacacctggcaccaacaccagcaaccaggtggctgtgctctaccaggatgtgaactgtactgaggtgcctgtggctatccatgctgaccaacttacaccaacctggagggtctacagcacaggcagcaatgtgttccagaccagggctggctgtctgattggagcagagcatgtgaacaactcctatgagtgtgacatcccaattggagcaggcatctgtgcctcctaccagacccagaccaacagcccaaggagggcaaggtctgtggcaagccagagcatcattgcctacacaatgagtctgggagcagagaactctgtggcttacagcaacaacagcattgccatcccaaccaacttcaccatctctgtgaccacagagattctgcctgtgagtatgaccaagacctctgtggactgtacaatgtatatctgtggagacagcacagagtgtagcaacctgctgctccaatatggctccttctgtacccaacttaacagggctctgacaggcattgctgtggaacaggacaagaacacccaggaggtgtttgcccaggtgaagcagatttacaagacacctccaatcaaggactttggaggcttcaacttcagccagattctgcctgacccaagcaagccaagcaagaggtccttcattgaggacctgctgttcaacaaggtgaccctggctgatgctggcttcatcaagcaatatggagactgtctgggagacattgctgccagggacctgatttgtgcccagaagttcaatggactgacagtgctgcctccactgctgacagatgagatgattgcccaatacacctctgccctgctggctggcaccatcacctctggctggacctttggagcaggagcagccctccaaatcccatttgctatgcagatggcttacaggttcaatggcattggagtgacccagaatgtgctctatgagaaccagaaactgattgccaaccagttcaactctgccattggcaagattcaggactccctgtccagcacagcctctgccctgggcaaactccaagatgtggtgaaccagaatgcccaggctctgaacaccctggtgaagcaactttccagcaactttggagccatctcctctgtgctgaatgacatcctgagcagactggacaaggtggaggctgaggtccagattgacagactgattacaggcagactccaatccctccaaacctatgtgacccaacaacttatcagggctgctgagattagggcatctgccaacctggctgccaccaagatgagtgagtgtgtgctgggacaaagcaagagggtggacttctgtggcaagggctaccacctgatgagttttccacagtctgcccctcatggagtggtgttcctgcatgtgacctatgtgcctgcccaggagaagaacttcaccacagcccctgccatctgccatgatggcaaggctcactttccaagggagggagtgtttgtgagcaatggcacccactggtttgtgacccagaggaacttctatgaaccacagattatcaccacagacaacacctttgtgtctggcaactgtgatgtggtgattggcattgtgaacaacacagtctatgacccactccaacctgaactggactccttcaaggaggaactggacaaatacttcaagaaccacaccagccctgatgtggacctgggagacatctctggcatcaatgcctctgtggtgaacatccagaaggagattgacagactgaatgaggtggctaagaacctgaatgagtccctgattgacctccaagaactgggcaaatatgaacaatacatcaagtggccatggtacatctggctgggcttcattgctggactgattgccattgtgatggtgaccataatgctgtgttgtatgacctcctgttgttcctgtctgaaaggctgttgttcctgtggctcctgttgttgaggatccgagctcggtaccaagcttaagtttaaaccgctgatcagcctcgactgtgccttctagttgccagccatctgttgtttgcccctcccccgtgccttccttgaccctggaaggtgccactcccactgtcctttcctaataaaatgaggaaattgcatcgcattgtctgagtaggtgtcattctattctggggggtggggtggggcaggacagcaagggggaggattgggaagacaatagcaggcatgctggggatgcggtgggctctatggcttctgaggcggaaagaaccagctggggctctagggggtatccccacgcgccctgtagcggcgcattaagcgcggcgggtgtggtggttacgcgcagcgtgaccgctacacttgccagcgccctagcgcccgctcctttcgctttcttcccttcctttctcgccacgttcgccggctttccccgtcaagctctaaatcgggggctccctttagggttccgatttagtgctttacggcacctcgaccccaaaaaacttgattagggtgatggttcacgtagtgggccatcgccctgatagacggtttttcgccctttgacgttggagtccacgttctttaatagtggactcttgttccaaactggaacaacactcaaccctatctcggtctattcttttgatttataagggattttgccgatttcggcctattggttaaaaaatgagctgatttaacaaaaatttaacgcgaattaattctgtggaatgtgtgtcagttagggtgtggaaagtccccaggctccccagcaggcagaagtatgcaaagcatgcatctcaattagtcagcaaccaggtgtggaaagtccccaggctccccagcaggcagaagtatgcaaagcatgcatctcaattagtcagcaaccatagtcccgcccctaactccgcccatcccgcccctaactccgcccagttccgcccattctccgccccatggctgactaattttttttatttatgcagaggccgaggccgcctctgcctctgagctattccagaagtagtgaggaggcttttttggaggcctaggcttttgcaaaaagctcccgggagcttgtatatccattttcggatctgatcaagagacaggatgaggatcgtttcgcatgattgaacaagatggattgcacgcaggttctccggccgcttgggtggagaggctattcggctatgactgggcacaacagacaatcggctgctctgatgccgccgtgttccggctgtcagcgcaggggcgcccggttctttttgtcaagaccgacctgtccggtgccctgaatgaactgcaggacgaggcagcgcggctatcgtggctggccacgacgggcgttccttgcgcagctgtgctcgacgttgtcactgaagcgggaagggactggctgctattgggcgaagtgccggggcaggatctcctgtcatctcaccttgctcctgccgagaaagtatccatcatggctgatgcaatgcggcggctgcatacgcttgatccggctacctgcccattcgaccaccaagcgaaacatcgcatcgagcgagcacgtactcggatggaagccggtcttgtcgatcaggatgatctggacgaagagcatcaggggctcgcgccagccgaactgttcgccaggctcaaggcgcgcatgcccgacggcgaggatctcgtcgtgacccatggcgatgcctgcttgccgaatatcatggtggaaaatggccgcttttctggattcatcgactgtggccggctgggtgtggcggaccgctatcaggacatagcgttggctacccgtgatattgctgaagagcttggcggcgaatgggctgaccgcttcctcgtgctttacggtatcgccgctcccgattcgcagcgcatcgccttctatcgccttcttgacgagttcttctgagcgggactctggggttcgaaatgaccgaccaagcgacgcccaacctgccatcacgagatttcgattccaccgccgccttctatgaaaggttgggcttcggaatcgttttccgggacgccggctggatgatcctccagcgcggggatctcatgctggagttcttcgcccaccccaacttgtttattgcagcttataatggttacaaataaagcaatagcatcacaaatttcacaaataaagcatttttttcactgcattctagttgtggtttgtccaaactcatcaatgtatcttatcatgtctgtataccgtcgacctctagctagagcttggcgtaatcatggtcatagctgtttcctgtgtgaaattgttatccgctcacaattccacacaacatacgagccggaagcataaagtgtaaagcctggggtgcctaatgagtgagctaactcacattaattgcgttgcgctcactgcccgctttccagtcgggaaacctgtcgtgccagctgcattaatgaatcggccaacgcgcggggagaggcggtttgcgtattgggcgctcttccgcttcctcgctcactgactcgctgcgctcggtcgttcggctgcggcgagcggtatcagctcactcaaaggcggtaatacggttatccacagaatcaggggataacgcaggaaagaacatgtgagcaaaaggccagcaaaaggccaggaaccgtaaaaaggccgcgttgctggcgtttttccataggctccgcccccctgacgagcatcacaaaaatcgacgctcaagtcagaggtggcgaaacccgacaggactataaagataccaggcgtttccccctggaagctccctcgtgcgctctcctgttccgaccctgccgcttaccggatacctgtccgcctttctcccttcgggaagcgtggcgctttctcatagctcacgctgtaggtatctcagttcggtgtaggtcgttcgctccaagctgggctgtgtgcacgaaccccccgttcagcccgaccgctgcgccttatccggtaactatcgtcttgagtccaacccggtaagacacgacttatcgccactggcagcagccactggtaacaggattagcagagcgaggtatgtaggcggtgctacagagttcttgaagtggtggcctaactacggctacactagaagaacagtatttggtatctgcgctctgctgaagccagttaccttcggaaaaagagttggtagctcttgatccggcaaacaaaccaccgctggtagcggtggtttttttgtttgcaagcagcagattacgcgcagaaaaaaaggatctcaagaagatcctttgatcttttctacggggtctgacgctcagtggaacgaaaactcacgttaagggattttggtcatgagattatcaaaaaggatcttcacctagatccttttaaattaaaaatgaagttttaaatcaatctaaagtatatatgagtaaacttggtctgacagttaccaatgcttaatcagtgaggcacctatctcagcgatctgtctatttcgttcatccatagttgcctgactccccgtcgtgtagataactacgatacgggagggcttaccatctggccccagtgctgcaatgataccgcgagacccacgctcaccggctccagatttatcagcaataaaccagccagccggaagggccgagcgcagaagtggtcctgcaactttatccgcctccatccagtctattaattgttgccgggaagctagagtaagtagttcgccagttaatagtttgcgcaacgttgttgccattgctacaggcatcgtggtgtcacgctcgtcgtttggtatggcttcattcagctccggttcccaacgatcaaggcgagttacatgatcccccatgttgtgcaaaaaagcggttagctccttcggtcctccgatcgttgtcagaagtaagttggccgcagtgttatcactcatggttatggcagcactgcataattctcttactgtcatgccatccgtaagatgcttttctgtgactggtgagtactcaaccaagtcattctgagaatagtgtatgcggcgaccgagttgctcttgcccggcgtcaatacgggataataccgcgccacatagcagaactttaaaagtgctcatcattggaaaacgttcttcggggcgaaaactctcaaggatcttaccgctgttgagatccagttcgatgtaacccactcgtgcacccaactgatcttcagcatcttttactttcaccagcgtttctgggtgagcaaaaacaggaaggcaaaatgccgcaaaaaagggaataagggcgacacggaaatgttgaatactcatactcttcctttttcaatattattgaagcatttatcagggttattgtctcatgagcggatacatatttgaatgtatttagaaaaataaacaaataggggttccgcgcacatttccccgaaaagtgccacctgacgtc

SEQ ID NO: 39 - DNA, 9499 bp, synthetic construct
  misc_feature 1..9499: note = pVP31b pcDNA3.1 Spike 6x p
  source 1..9499: mol_type = other DNA
gacggatcgggagatctcccgatcccctatggtgcactctcagtacaatctgctctgatgccgcatagttaagccagtatctgctccctgcttgtgtgttggaggtcgctgagtagtgcgcgagcaaaatttaagctacaacaaggcaaggcttgaccgacaattgcatgaagaatctgcttagggttaggcgttttgcgctgcttcgcgatgtacgggccagatatacgcgttgacattgattattgactagttattaatagtaatcaattacggggtcattagttcatagcccatatatggagttccgcgttacataacttacggtaaatggcccgcctggctgaccgcccaacgacccccgcccattgacgtcaataatgacgtatgttcccatagtaacgccaatagggactttccattgacgtcaatgggtggagtatttacggtaaactgcccacttggcagtacatcaagtgtatcatatgccaagtacgccccctattgacgtcaatgacggtaaatggcccgcctggcattatgcccagtacatgaccttatgggactttcctacttggcagtacatctacgtattagtcatcgctattaccatggtgatgcggttttggcagtacatcaatgggcgtggatagcggtttgactcacggggatttccaagtctccaccccattgacgtcaatgggagtttgttttggcaccaaaatcaacgggactttccaaaatgtcgtaacaactccgccccattgacgcaaatgggcggtaggcgtgtacggtgggaggtctatataagcagagctctctggctaactagagaacccactgcttactggcttatcgaaattaatacgactcactatagggagacccaagctggctagccaccgagaataaactagtattcttctggtccccacagactcagagagaacccgccaccatgtttgtgttcctggtgctgctgccactggtgtccagccagtgtgtgaacctgaccaccaggacccaacttcctcctgcctacaccaactccttcaccaggggagtctactaccctgacaaggtgttcaggtcctctgtgctgcacagcacccaggacctgttcctgccattcttcagcaatgtgacctggttccatgccatccatgtgtctggcaccaatggcaccaagaggtttgacaaccctgtgctgccattcaatgatggagtctactttgccagcacagagaagagcaacatcatcaggggctggatttttggcaccaccctggacagcaagacccagtccctgctgattgtgaacaatgccaccaatgtggtgattaaggtgtgtgagttccagttctgtaatgacccattcctgggagtctactaccacaagaacaacaagtcctggatggagtctgagttcagggtctactcctctgccaacaactgtacctttgaatatgtgagccaaccattcctgatggacttggagggcaagcagggcaacttcaagaacctgagggagtttgtgttcaagaacattgatggctacttcaagatttacagcaaacacacaccaatcaacctggtgagggacctgccacagggcttctctgccttggaaccactggtggacctgccaattggcatcaacatcaccaggttccagaccctgctggctctgcacaggtcctacctgacacctggagactcctcctctggctggacagcaggagcagcagcctactatgtgggctacctccaaccaaggaccttcctgctgaaatacaatgagaatggcaccatcacagatgctgtggactgtgccctggacccactgtctgagaccaagtgtaccctgaaatccttcacagtggagaagggcatctaccagaccagcaacttcagggtccaaccaacagagagcattgtgaggtttccaaacatcaccaacctgtgtccatttggagaggtgttcaatgccaccaggtttgcctctgtctatgcctggaacaggaagaggattagcaactgtgtggctgactactctgtgctctacaactctgcctccttcagcaccttcaagtgttatggagtgagcccaaccaaactgaatgacctgtgtttcaccaatgtctatgctgactcctttgtgattaggggagatgaggtgagacagattgcccctggacaaacaggcaagattgctgactacaactacaaactgcctgatgacttcacaggctgtgtgattgcctggaacagcaacaacctggacagcaaggtgggaggcaactacaactacctctacagactgttcaggaagagcaacctgaaaccatttgagagggacatcagcacagagatttaccaggctggcagcacaccatgtaatggagtggagggcttcaactgttactttccactccaatcctatggcttccaaccaaccaatggagtgggctaccaaccatacagggtggtggtgctgtcctttgaactgctccatgcccctgccacagtgtgtggaccaaagaagagcaccaacctggtgaagaacaagtgtgtgaacttcaacttcaatggactgacaggcacaggagtgctgacagagagcaacaagaagttcctgccattccaacagtttggcagggacattgctgacaccacagatgctgtgagggacccacagaccttggagattctggacatcacaccatgttcctttggaggagtgtctgtgattacacctggcaccaacaccagcaaccaggtggctgtgctctaccaggatgtgaactgtactgaggtgcctgtggctatccatgctgaccaacttacaccaacctggagggtctacagcacaggcagcaatgtgttccagaccagggctggctgtctgattggagcagagcatgtgaacaactcctatgagtgtgacatcccaattggagcaggcatctgtgcctcctaccagacccagaccaacagcccaggctctgcatcttctgtggcaagccagagcatcattgcctacacaatgagtctgggagcagagaactctgtggcttacagcaacaacagcattgccatcccaaccaacttcaccatctctgtgaccacagagattctgcctgtgagtatgaccaagacctctgtggactgtacaatgtatatctgtggagacagcacagagtgtagcaacctgctgctccaatatggctccttctgtacccaacttaacagggctctgacaggcattgctgtggaacaggacaagaacacccaggaggtgtttgcccaggtgaagcagatttacaagacacctccaatcaaggactttggaggcttcaacttcagccagattctgcctgacccaagcaagccaagcaagaggtcccctattgaggacctgctgttcaacaaggtgaccctggctgatgctggcttcatcaagcaatatggagactgtctgggagacattgctgccagggacctgatttgtgcccagaagttcaatggactgacagtgctgcctccactgctgacagatgagatgattgcccaatacacctctgccctgctggctggcaccatcacctctggctggacctttggagcaggaccagccctccaaatcccatttccaatgcagatggcttacaggttcaatggcattggagtgacccagaatgtgctctatgagaaccagaaactgattgccaaccagttcaactctgccattggcaagattcaggactccctgtccagcacaccatctgccctgggcaaactccaagatgtggtgaaccagaatgcccaggctctgaacaccctggtgaagcaactttccagcaactttggagccatctcctctgtgctgaatgacatcctgagcagactggacccaccagaggctgaggtccagattgacagactgattacaggcagactccaatccctccaaacctatgtgacccaacaacttatcagggctgctgagattagggcatctgccaacctggctgccaccaagatgagtgagtgtgtgctgggacaaagcaagagggtggacttctgtggcaagggctaccacctgatgagttttccacagtctgcccctcatggagtggtgttcctgcatgtgacctatgtgcctgcccaggagaagaacttcaccacagcccctgccatctgccatgatggcaaggctcactttccaagggagggagtgtttgtgagcaatggcacccactggtttgtgacccagaggaacttctatgaaccacagattatcaccacagacaacacctttgtgtctggcaactgtgatgtggtgattggcattgtgaacaacacagtctatgacccactccaacctgaactggactccttcaaggaggaactggacaaatacttcaagaaccacaccagccctgatgtggacctgggagacatctctggcatcaatgcctctgtggtgaacatccagaaggagattgacagactgaatgaggtggctaagaacctgaatgagtccctgattgacctccaagaactgggcaaatatgaacaatacatcaagtggccatggtacatctggctgggcttcattgctggactgattgccattgtgatggtgaccataatgctgtgttgtatgacctcctgttgttcctgtctgaaaggctgttgttcctgtggctcctgttgtaagtttgatgaggatgactctgaacctgtgctgaaaggagtgaaactgcactacacctgactcgagctggtactgcatgcacgcaatgctagctgcccctttcccgtcctgggtaccccgagtctcccccgacctcgggtcccaggtatgctcccacctccacctgccccactcaccacctctgctagttccagacacctcccaagcacgcagcaatgcagctcaaaacgcttagcctagccacacccccacgggaaacagcagtgattaacctttagcaataaacgaaagtttaactaagctatactaaccccagggttggtcaatttcgtgccagccacaccctggagctagcaaaccgctgatcagcctcgactgtgccttctagttgccagccatctgttgtttgcccctcccccgtgccttccttgaccctggaaggtgccactcccactgtcctttcctaataaaatgaggaaattgcatcgcattgtctgagtaggtgtcattctattctggggggtggggtggggcaggacagcaagggggaggattgggaagacaatagcaggcatgctggggatgcggtgggctctatggcttctgaggcggaaagaaccagctggggctctagggggtatccccacgcgccctgtagcggcgcattaagcgcggcgggtgtggtggttacgcgcagcgtgaccgctacacttgccagcgccctagcgcccgctcctttcgctttcttcccttcctttctcgccacgttcgccggctttccccgtcaagctctaaatcgggggctccctttagggttccgatttagtgctttacggcacctcgaccccaaaaaacttgattagggtgatggttcacgtagtgggccatcgccctgatagacggtttttcgccctttgacgttggagtccacgttctttaatagtggactcttgttccaaactggaacaacactcaaccctatctcggtctattcttttgatttataagggattttgccgatttcggcctattggttaaaaaatgagctgatttaacaaaaatttaacgcgaattaattctgtggaatgtgtgtcagttagggtgtggaaagtccccaggctccccagcaggcagaagtatgcaaagcatgcatctcaattagtcagcaaccaggtgtggaaagtccccaggctccccagcaggcagaagtatgcaaagcatgcatctcaattagtcagcaaccatagtcccgcccctaactccgcccatcccgcccctaactccgcccagttccgcccattctccgccccatggctgactaattttttttatttatgcagaggccgaggccgcctctgcctctgagctattccagaagtagtgaggaggcttttttggaggcctaggcttttgcaaaaagctcccgggagcttgtatatccattttcggatctgatcaagagacaggatgaggatcgtttcgcatgattgaacaagatggattgcacgcaggttctccggccgcttgggtggagaggctattcggctatgactgggcacaacagacaatcggctgctctgatgccgccgtgttccggctgtcagcgcaggggcgcccggttctttttgtcaagaccgacctgtccggtgccctgaatgaactgcaggacgaggcagcgcggctatcgtggctggccacgacgggcgttccttgcgcagctgtgctcgacgttgtcactgaagcgggaagggactggctgctattgggcgaagtgccggggcaggatctcctgtcatctcaccttgctcctgccgagaaagtatccatcatggctgatgcaatgcggcggctgcatacgcttgatccggctacctgcccattcgaccaccaagcgaaacatcgcatcgagcgagcacgtactcggatggaagccggtcttgtcgatcaggatgatctggacgaagagcatcaggggctcgcgccagccgaactgttcgccaggctcaaggcgcgcatgcccgacggcgaggatctcgtcgtgacccatggcgatgcctgcttgccgaatatcatggtggaaaatggccgcttttctggattcatcgactgtggccggctgggtgtggcggaccgctatcaggacatagcgttggctacccgtgatattgctgaagagcttggcggcgaatgggctgaccgcttcctcgtgctttacggtatcgccgctcccgattcgcagcgcatcgccttctatcgccttcttgacgagttcttctgagcgggactctggggttcgaaatgaccgaccaagcgacgcccaacctgccatcacgagatttcgattccaccgccgccttctatgaaaggttgggcttcggaatcgttttccgggacgccggctggatgatcctccagcgcggggatctcatgctggagttcttcgcccaccccaacttgtttattgcagcttataatggttacaaataaagcaatagcatcacaaatttcacaaataaagcatttttttcactgcattctagttgtggtttgtccaaactcatcaatgtatcttatcatgtctgtataccgtcgacctctagctagagcttggcgtaatcatggtcatagctgtttcctgtgtgaaattgttatccgctcacaattccacacaacatacgagccggaagcataaagtgtaaagcctggggtgcctaatgagtgagctaactcacattaattgcgttgcgctcactgcccgctttccagtcgggaaacctgtcgtgccagctgcattaatgaatcggccaacgcgcggggagaggcggtttgcgtattgggcgctcttccgcttcctcgctcactgactcgctgcgctcggtcgttcggctgcggcgagcggtatcagctcactcaaaggcggtaatacggttatccacagaatcaggggataacgcaggaaagaacatgtgagcaaaaggccagcaaaaggccaggaaccgtaaaaaggccgcgttgctggcgtttttccataggctccgcccccctgacgagcatcacaaaaatcgacgctcaagtcagaggtggcgaaacccgacaggactataaagataccaggcgtttccccctggaagctccctcgtgcgctctcctgttccgaccctgccgcttaccggatacctgtccgcctttctcccttcgggaagcgtggcgctttctcatagctcacgctgtaggtatctcagttcggtgtaggtcgttcgctccaagctgggctgtgtgcacgaaccccccgttcagcccgaccgctgcgccttatccggtaactatcgtcttgagtccaacccggtaagacacgacttatcgccactggcagcagccactggtaacaggattagcagagcgaggtatgtaggcggtgctacagagttcttgaagtggtggcctaactacggctacactagaagaacagtatttggtatctgcgctctgctgaagccagttaccttcggaaaaagagttggtagctcttgatccggcaaacaaaccaccgctggtagcggtggtttttttgtttgcaagcagcagattacgcgcagaaaaaaaggatctcaagaagatcctttgatcttttctacggggtctgacgctcagtggaacgaaaactcacgttaagggattttggtcatgagattatcaaaaaggatcttcacctagatccttttaaattaaaaatgaagttttaaatcaatctaaagtatatatgagtaaacttggtctgacagttaccaatgcttaatcagtgaggcacctatctcagcgatctgtctatttcgttcatccatagttgcctgactccccgtcgtgtagataactacgatacgggagggcttaccatctggccccagtgctgcaatgataccgcgagacccacgctcaccggctccagatttatcagcaataaaccagccagccggaagggccgagcgcagaagtggtcctgcaactttatccgcctccatccagtctattaattgttgccgggaagctagagtaagtagttcgccagttaatagtttgcgcaacgttgttgccattgctacaggcatcgtggtgtcacgctcgtcgtttggtatggcttcattcagctccggttcccaacgatcaaggcgagttacatgatcccccatgttgtgcaaaaaagcggttagctccttcggtcctccgatcgttgtcagaagtaagttggccgcagtgttatcactcatggttatggcagcactgcataattctcttactgtcatgccatccgtaagatgcttttctgtgactggtgagtactcaaccaagtcattctgagaatagtgtatgcggcgaccgagttgctcttgcccggcgtcaatacgggataataccgcgccacatagcagaactttaaaagtgctcatcattggaaaacgttcttcggggcgaaaactctcaaggatcttaccgctgttgagatccagttcgatgtaacccactcgtgcacccaactgatcttcagcatcttttactttcaccagcgtttctgggtgagcaaaaacaggaaggcaaaatgccgcaaaaaagggaataagggcgacacggaaatgttgaatactcatactcttcctttttcaatattattgaagcatttatcagggttattgtctcatgagcggatacatatttgaatgtatttagaaaaataaacaaataggggttccgcgcacatttccccgaaaagtgccacctgacgtc

SEQ ID NO: 40 - DNA, 9445 bp, synthetic construct
  misc_feature 1..9445: note = pVP33b SARS CoV UTR Hexapro
  source 1..9445: mol_type = other DNA
gacggatcgggagatctcccgatcccctatggtgcactctcagtacaatctgctctgatgccgcatagttaagccagtatctgctccctgcttgtgtgttggaggtcgctgagtagtgcgcgagcaaaatttaagctacaacaaggcaaggcttgaccgacaattgcatgaagaatctgcttagggttaggcgttttgcgctgcttcgcgatgtacgggccagatatacgcgttgacattgattattgactagttattaatagtaatcaattacggggtcattagttcatagcccatatatggagttccgcgttacataacttacggtaaatggcccgcctggctgaccgcccaacgacccccgcccattgacgtcaataatgacgtatgttcccatagtaacgccaatagggactttccattgacgtcaatgggtggagtatttacggtaaactgcccacttggcagtacatcaagtgtatcatatgccaagtacgccccctattgacgtcaatgacggtaaatggcccgcctggcattatgcccagtacatgaccttatgggactttcctacttggcagtacatctacgtattagtcatcgctattaccatggtgatgcggttttggcagtacatcaatgggcgtggatagcggtttgactcacggggatttccaagtctccaccccattgacgtcaatgggagtttgttttggcaccaaaatcaacgggactttccaaaatgtcgtaacaactccgccccattgacgcaaatgggcggtaggcgtgtacggtgggaggtctatataagcagagctctctggctaactagagaacccactgcttactggcttatcgaaattaatacgactcactatagggagacccaagctggctagccaccgagaataaactagtattcttctggtccccacagactcagagagaacccgccaccatgttcatcttcctgctgttcctgaccctgacctctggctctgacctggacaggtgtaccacctttgatgatgtccaggctccaaactacacccaacacacctccagtatgaggggagtctactaccctgatgagattttcaggtctgacaccctctacctgacccaggacctgttcctgccattctacagcaatgtgacaggcttccacaccatcaaccacacctttgacaaccctgtgattccattcaaggatggcatctactttgctgccacagagaagagcaatgtggtgaggggctgggtgtttggcagcacaatgaacaacaagagccagtctgtgattatcatcaacaacagcaccaatgtggtgattagggcttgtaactttgaactgtgtgacaacccattctttgctgtgagcaagcctatgggcacccagacccacacaatgatttttgacaatgccttcaactgtacctttgaatacatctctgatgccttctccctggatgtgtctgagaagtctggcaacttcaaacacctgagggagtttgtgttcaagaacaaggatggcttcctctatgtctacaagggctaccaaccaattgatgtggtgagggacctgccatctggcttcaacaccctgaaaccaatcttcaaactgccactgggcatcaacatcaccaacttcagggctatcctgacagccttcagccctgcccaggacacctggggcacctctgctgctgcctactttgtgggctacctgaaaccaaccacctttatgctgaaatatgatgagaatggcaccatcacagatgctgtggactgtagccagaacccactggctgaactgaaatgttctgtgaagtcctttgagattgacaagggcatctaccagaccagcaacttcagggtggtgccatctggagatgtggtgaggtttccaaacatcaccaacctgtgtccatttggagaggtgttcaatgccaccaagtttccatctgtctatgcctgggagaggaagaagattagcaactgtgtggctgactactctgtgctctacaacagcaccttcttcagcaccttcaagtgttatggagtgtctgccaccaaactgaatgacctgtgtttcagcaatgtctatgctgactcctttgtggtgaagggagatgatgtgagacagattgcccctggacaaacaggagtgattgctgactacaactacaaactgcctgatgactttatgggctgtgtgctggcttggaacaccaggaacattgatgccaccagcacaggcaactacaactacaaatacagatacctgagacatggcaaactgagaccatttgagagggacatcagcaatgtgccattcagccctgatggcaagccatgtactcctcctgccctgaactgttactggccactgaatgactatggcttctacaccaccacaggcattggctaccaaccatacagggtggtggtgctgtcctttgaactgctgaatgcccctgccacagtgtgtggaccaaaactgagcacagacctgattaagaaccagtgtgtgaacttcaacttcaatggactgacaggcacaggagtgctgacaccatccagcaagaggttccaaccattccaacagtttggcagggatgtgtctgacttcacagactctgtgagggacccaaagacctctgagattctggacatcagcccatgttcctttggaggagtgtctgtgattacacctggcaccaatgcctcctctgaggtggctgtgctctaccaggatgtgaactgtactgatgtgagcacagccatccatgctgaccaacttacacctgcctggaggatttacagcacaggcaacaatgtgttccagacccaggctggctgtctgattggagcagagcatgtggacacctcctatgagtgtgacatcccaattggagcaggcatctgtgcctcctaccacacagtgtccctgctgaggagcaccagccagaagagcattgtggcttacacaatgagtctgggagcagactccagcattgcctacagcaacaacaccattgccatcccaaccaacttcagcatcagcatcaccacagaggtgatgcctgtgagtatggctaagacctctgtggactgtaatatgtatatctgtggagacagcacagagtgtgccaacctgctgctccaatatggctccttctgtacccaacttaacagggctctgtctggcattgctgctgaacaggacaggaacaccagggaggtgtttgcccaggtgaagcagatgtataagacaccaaccctgaaatactttggaggcttcaacttcagccagattctgcctgacccactgaaaccaaccaagaggtccccaattgaggacctgctgttcaacaaggtgaccctggctgatgctggctttatgaagcaatatggagagtgtctgggagacatcaatgccagggacctgatttgtgcccagaagttcaatggactgacagtgctgcctccactgctgacagatgatatgattgctgcctacacagcagccctggtgtctggcacagccacagcaggctggacctttggagcaggaccagccctccaaatcccatttccaatgcagatggcttacaggttcaatggcattggagtgacccagaatgtgctctatgagaaccagaagcagattgccaaccagttcaacaaggctatcagccagattcaggagtccctgaccaccaccccaacagccctgggcaaactccaagatgtggtgaaccagaatgcccaggctctgaacaccctggtgaagcaactttccagcaactttggagccatctcctctgtgctgaatgacatcctgagcagactggacccaccagaggctgaggtccagattgacagactgattacaggcagactccaatccctccaaacctatgtgacccaacaacttatcagggctgctgagattagggcatctgccaacctggctgccaccaagatgagtgagtgtgtgctgggacaaagcaagagggtggacttctgtggcaagggctaccacctgatgagttttccacaggctgcccctcatggagtggtgttcctgcatgtgacctatgtgccaagccaggagaggaacttcaccacagcccctgccatctgccatgagggcaaggcttactttccaagggagggagtgtttgtgttcaatggcacctcctggttcatcacccagaggaacttcttcagcccacagattatcaccacagacaacacctttgtgtctggcaactgtgatgtggtgattggcatcatcaacaacacagtctatgacccactccaacctgaactggactccttcaaggaggaactggacaaatacttcaagaaccacaccagccctgatgtggacctgggagacatctctggcatcaatgcctctgtggtgaacatccagaaggagattgacagactgaatgaggtggctaagaacctgaatgagtccctgattgacctccaagaactgggcaaatatgaacaatacatcaagtggccatggtatgtgtggctgggcttcattgctggactgattgccattgtgatggtgaccatcctgctgtgttgtatgacctcctgttgttcctgtctgaaaggagcctgttcctgtggctcctgttgtaagtttgatgaggatgactctgaacctgtgctgaaaggagtgaaactgcactacacctaactcgagctggtactgcatgcacgcaatgctagctgcccctttcccgtcctgggtaccccgagtctcccccgacctcgggtcccaggtatgctcccacctccacctgccccactcaccacctctgctagttccagacacctcccaagcacgcagcaatgcagctcaaaacgcttagcctagccacacccccacgggaaacagcagtgattaacctttagcaataaacgaaagtttaactaagctatactaaccccagggttggtcaatttcgtgccagccacaccctggagctagcaaaccgctgatcagcctcgactgtgccttctagttgccagccatctgttgtttgcccctcccccgtgccttccttgaccctggaaggtgccactcccactgtcctttcctaataaaatgaggaaattgcatcgcattgtctgagtaggtgtcattctattctggggggtggggtggggcaggacagcaagggggaggattgggaagacaatagcaggcatgctggggatgcggtgggctctatggcttctgaggcggaaagaaccagctggggctctagggggtatccccacgcgccctgtagcggcgcattaagcgcggcgggtgtggtggttacgcgcagcgtgaccgctacacttgccagcgccctagcgcccgctcctttcgctttcttcccttcctttctcgccacgttcgccggctttccccgtcaagctctaaatcgggggctccctttagggttccgatttagtgctttacggcacctcgaccccaaaaaacttgattagggtgatggttcacgtagtgggccatcgccctgatagacggtttttcgccctttgacgttggagtccacgttctttaatagtggactcttgttccaaactggaacaacactcaaccctatctcggtctattcttttgatttataagggattttgccgatttcggcctattggttaaaaaatgagctgatttaacaaaaatttaacgcgaattaattctgtggaatgtgtgtcagttagggtgtggaaagtccccaggctccccagcaggcagaagtatgcaaagcatgcatctcaattagtcagcaaccaggtgtggaaagtccccaggctccccagcaggcagaagtatgcaaagcatgcatctcaattagtcagcaaccatagtcccgcccctaactccgcccatcccgcccctaactccgcccagttccgcccattctccgccccatggctgactaattttttttatttatgcagaggccgaggccgcctctgcctctgagctattccagaagtagtgaggaggcttttttggaggcctaggcttttgcaaaaagctcccgggagcttgtatatccattttcggatctgatcaagagacaggatgaggatcgtttcgcatgattgaacaagatggattgcacgcaggttctccggccgcttgggtggagaggctattcggctatgactgggcacaacagacaatcggctgctctgatgccgccgtgttccggctgtcagcgcaggggcgcccggttctttttgtcaagaccgacctgtccggtgccctgaatgaactgcaggacgaggcagcgcggctatcgtggctggccacgacgggcgttccttgcgcagctgtgctcgacgttgtcactgaagcgggaagggactggctgctattgggcgaagtgccggggcaggatctcctgtcatctcaccttgctcctgccgagaaagtatccatcatggctgatgcaatgcggcggctgcatacgcttgatccggctacctgcccattcgaccaccaagcgaaacatcgcatcgagcgagcacgtactcggatggaagccggtcttgtcgatcaggatgatctggacgaagagcatcaggggctcgcgccagccgaactgttcgccaggctcaaggcgcgcatgcccgacggcgaggatctcgtcgtgacccatggcgatgcctgcttgccgaatatcatggtggaaaatggccgcttttctggattcatcgactgtggccggctgggtgtggcggaccgctatcaggacatagcgttggctacccgtgatattgctgaagagcttggcggcgaatgggctgaccgcttcctcgtgctttacggtatcgccgctcccgattcgcagcgcatcgccttctatcgccttcttgacgagttcttctgagcgggactctggggttcgaaatgaccgaccaagcgacgcccaacctgccatcacgagatttcgattccaccgccgccttctatgaaaggttgggcttcggaatcgttttccgggacgccggctggatgatcctccagcgcggggatctcatgctggagttcttcgcccaccccaacttgtttattgcagcttataatggttacaaataaagcaatagcatcacaaatttcacaaataaagcatttttttcactgcattctagttgtggtttgtccaaactcatcaatgtatcttatcatgtctgtataccgtcgacctctagctagagcttggcgtaatcatggtcatagctgtttcctgtgtgaaattgttatccgctcacaattccacacaacatacgagccggaagcataaagtgtaaagcctggggtgcctaatgagtgagctaactcacattaattgcgttgcgctcactgcccgctttccagtcgggaaacctgtcgtgccagctgcattaatgaatcggccaacgcgcggggagaggcggtttgcgtattgggcgctcttccgcttcctcgctcactgactcgctgcgctcggtcgttcggctgcggcgagcggtatcagctcactcaaaggcggtaatacggttatccacagaatcaggggataacgcaggaaagaacatgtgagcaaaaggccagcaaaaggccaggaaccgtaaaaaggccgcgttgctggcgtttttccataggctccgcccccctgacgagcatcacaaaaatcgacgctcaagtcagaggtggcgaaacccgacaggactataaagataccaggcgtttccccctggaagctccctcgtgcgctctcctgttccgaccctgccgcttaccggatacctgtccgcctttctcccttcgggaagcgtggcgctttctcatagctcacgctgtaggtatctcagttcggtgtaggtcgttcgctccaagctgggctgtgtgcacgaaccccccgttcagcccgaccgctgcgccttatccggtaactatcgtcttgagtccaacccggtaagacacgacttatcgccactggcagcagccactggtaacaggattagcagagcgaggtatgtaggcggtgctacagagttcttgaagtggtggcctaactacggctacactagaagaacagtatttggtatctgcgctctgctgaagccagttaccttcggaaaaagagttggtagctcttgatccggcaaacaaaccaccgctggtagcggtggtttttttgtttgcaagcagcagattacgcgcagaaaaaaaggatctcaagaagatcctttgatcttttctacggggtctgacgctcagtggaacgaaaactcacgttaagggattttggtcatgagattatcaaaaaggatcttcacctagatccttttaaattaaaaatgaagttttaaatcaatctaaagtatatatgagtaaacttggtctgacagttaccaatgcttaatcagtgaggcacctatctcagcgatctgtctatttcgttcatccatagttgcctgactccccgtcgtgtagataactacgatacgggagggcttaccatctggccccagtgctgcaatgataccgcgagacccacgctcaccggctccagatttatcagcaataaaccagccagccggaagggccgagcgcagaagtggtcctgcaactttatccgcctccatccagtctattaattgttgccgggaagctagagtaagtagttcgccagttaatagtttgcgcaacgttgttgccattgctacaggcatcgtggtgtcacgctcgtcgtttggtatggcttcattcagctccggttcccaacgatcaaggcgagttacatgatcccccatgttgtgcaaaaaagcggttagctccttcggtcctccgatcgttgtcagaagtaagttggccgcagtgttatcactcatggttatggcagcactgcataattctcttactgtcatgccatccgtaagatgcttttctgtgactggtgagtactcaaccaagtcattctgagaatagtgtatgcggcgaccgagttgctcttgcccggcgtcaatacgggataataccgcgccacatagcagaactttaaaagtgctcatcattggaaaacgttcttcggggcgaaaactctcaaggatcttaccgctgttgagatccagttcgatgtaacccactcgtgcacccaactgatcttcagcatcttttactttcaccagcgtttctgggtgagcaaaaacaggaaggcaaaatgccgcaaaaaagggaataagggcgacacggaaatgttgaatactcatactcttcctttttcaatattattgaagcatttatcagggttattgtctcatgagcggatacatatttgaatgtatttagaaaaataaacaaataggggttccgcgcacatttccccgaaaagtgccacctgacgtc

SEQ ID NO: 41 - DNA, 9739 bp, synthetic construct
  misc_feature 1..9739: note = pVP34c MERS CoV UTR Hexapro
  source 1..9739: mol_type = other DNA
gacggatcgggagatctcccgatcccctatggtgcactctcagtacaatctgctctgatgccgcatagttaagccagtatctgctccctgcttgtgtgttggaggtcgctgagtagtgcgcgagcaaaatttaagctacaacaaggcaaggcttgaccgacaattgcatgaagaatctgcttagggttaggcgttttgcgctgcttcgcgatgtacgggccagatatacgcgttgacattgattattgactagttattaatagtaatcaattacggggtcattagttcatagcccatatatggagttccgcgttacataacttacggtaaatggcccgcctggctgaccgcccaacgacccccgcccattgacgtcaataatgacgtatgttcccatagtaacgccaatagggactttccattgacgtcaatgggtggagtatttacggtaaactgcccacttggcagtacatcaagtgtatcatatgccaagtacgccccctattgacgtcaatgacggtaaatggcccgcctggcattatgcccagtacatgaccttatgggactttcctacttggcagtacatctacgtattagtcatcgctattaccatggtgatgcggttttggcagtacatcaatgggcgtggatagcggtttgactcacggggatttccaagtctccaccccattgacgtcaatgggagtttgttttggcaccaaaatcaacgggactttccaaaatgtcgtaacaactccgccccattgacgcaaatgggcggtaggcgtgtacggtgggaggtctatataagcagagctctctggctaactagagaacccactgcttactggcttatcgaaattaatacgactcactatagggagacccaagctggctagccaccgagaataaactagtattcttctggtccccacagactcagagagaacccgccaccatgattcactctgtgttcctgctgatgttcctgctgacaccaacagagtcctatgtggatgtgggacctgactctgtgaagtctgcctgtattgaggtggacatccaacagaccttctttgacaagacctggccaagaccaattgatgtgagcaaggctgatggcatcatctacccacagggcaggacctacagcaacatcaccatcacctaccagggactgtttccataccagggagatcatggagatatgtatgtctactctgctggtcatgccacaggcaccacaccacagaaactgtttgtggctaactacagccaggatgtgaagcagtttgccaatggctttgtggtgaggattggagcagcagccaacagcacaggcacagtgattatcagcccaagcacctctgccaccatcaggaagatttaccctgcctttatgctgggctcctctgtgggcaacttctctgatggcaagatgggcaggttcttcaaccacaccctggtgctgctgcctgatggctgtggcaccctgctgagggctttctactgtatcttggaaccaaggtctggcaaccactgtcctgctggcaactcctacacctcctttgccacctaccacacacctgccacagactgttctgatggcaactacaacaggaatgcctccctgaactccttcaaggaatacttcaacctgaggaactgtacctttatgtacacctacaacatcacagaggatgagattttggagtggtttggcatcacccagacagcccagggagtgcatctgttctcgagcagatatgtggacctctatggaggcaatatgttccagtttgccaccctgcctgtctatgacaccatcaaatactacagcatcatcccacacagcatcaggagcatccagtctgacaggaaggcttgggctgccttctatgtctacaaactccaaccactgaccttcctgctggacttctctgtggatggctacatcaggagggctattgactgtggcttcaatgacctgagccaacttcactgttcctatgagtcctttgatgtggagtctggagtctactctgtgtcctcctttgaggctaagccatctggctctgtggtggaacaggctgagggagtggagtgtgacttcagcccactgctgtctggcacacctccacaggtctacaacttcaagagactggtgttcaccaactgtaactacaacctgaccaaactgctgtccctgttctctgtgaatgacttcacttgtagccagattagccctgctgccattgccagcaactgttactcctccctgattctggactacttctcctacccactgagtatgaagtctgacctgtctgtgtcctctgctggaccaatcagccagttcaactacaagcagtccttcagcaacccaacttgtctgattctggctacagtgccacacaacctgaccaccatcaccaagccactgaaatactcctacatcaacaagtgtagcagactgctgtctgatgacaggacagaggtgccacaactagtgaatgccaaccaatacagcccatgtgtgagcattgtgccaagcacagtgtgggaggatggagactactacaggaagcaacttagcccattggagggaggaggctggctggtggcatctggcagcacagtggctatgacagaacaactccaaatgggctttggcatcacagtccaatatggcacagacaccaactctgtgtgtccaaaattggagtttgccaatgacaccaagattgccagccaacttggcaactgtgtggaatactccctctatggagtgtctggcaggggagtgttccagaactgtactgctgtgggagtgagacaacagaggtttgtctatgatgcctaccagaacctggtgggctactactctgatgatggcaactactactgtctgagggcttgtgtgtctgtgcctgtgtctgtgatttatgacaaggagaccaagacccatgccaccctgtttggctctgtggcttgtgaacacatctccagcacaatgagtcaatacagcaggagcaccaggagtatgctgaaaaggagggacagcacatatggaccactccaaacacctgtgggctgtgtgctgggactggtgaactcctccctgtttgtggaggactgtaaactgccactgggacaatccctgtgtgccctgcctgacacaccaagcaccctgacaccaaggtctgtgaggtctgtgcctggagagatgagactggcaagcattgccttcaaccacccaatccaggtggaccaacttaactcctcctacttcaaactgagcatcccaaccaacttctcctttggagtgacccaggaatacatccagaccaccatccagaaggtgacagtggactgtaagcaatatgtgtgtaatggcttccagaagtgtgaacaacttctgagggaatatggacaattctgtagcaagataaaccaggctcttcatggagccaacctgagacaggatgactctgtgaggaacctgtttgcctctgtgaagtccagccagtccagcccaatcatccctggctttggaggagacttcaacctgaccctgttggaaccggtgagcatcagcacaggcagcaggtctgccaggtctccaattgaggacctgctgtttgacaaggtgaccattgctgaccctggctatatgcagggctatgatgactgtatgcaacagggacctgcctctgccagggacctgatttgtgcccaatatgtggctggctacaaggtgctgcctccactgatggatgtgaatatggaggctgcctacacctcctccctgctgggcagcattgctggagtgggctggactgcaggactgtccccatttgctgccatcccatttccacagagcatcttctacagactgaatggagtgggcatcacccaacaggtgctgtctgagaaccagaaactgattgccaacaagttcaaccaggctctgggagctatgcagacaggcttcaccaccaccccagaggctttccagaaggtccaggatgctgtgaacaacaatgcccaggctctgagcaaactggcatctgaactgagcaacacctttggagccatctctgctagcattggagacatcatccagagactggatccaccagaacaggatgcccagattgacagactgataaatggcagactgaccaccctgaatgcctttgtggctcaacaacttgtgaggtctgagtctgctgccctgtctgcccaacttgccaaggacaaggtgaatgagtgtgtgaaggctcaaagcaagaggtctggcttctgtggacaaggcacccacattgtgtcctttgtggtgaatgccccaaatggactctactttatgcatgtgggctactacccaagcaaccacattgaggtggtgtctgcctatggactgtgtgatgctgccaacccaaccaactgtattgcccctgtgaatggctacttcatcaagaccaacaacaccaggattgtggatgagtggtcctacacaggctcctccttctatgcccctgaaccaatcacctccctgaacaccaaatatgtggctccacaggtgacctaccagaacatcagcaccaacctgcctcctccactgctgggcaacagcacaggcattgacttccaggatgaactggatgagttcttcaagaatgtgagcaccagcatcccaaactttggctccctgacccagataaacaccaccctgctggacctgacctatgagatgctgtccctccaacaggtggtgaaggctctgaatgagtcctacattgacctgaaagaactgggcaactacacctactacaacaagtggccatggtacatctggctgggcttcatcgctggcctggtggccctggcgctgtgcgtgttcttcatcctgtgctgcaccggctgcggcaccaactgcatgggcaagctgaagtgcaacaggtgctgcgacaggtacgaggagtacgacctggagccccacaaggtgcacgtacattaactcgagctggtactgcatgcacgcaatgctagctgcccctttcccgtcctgggtaccccgagtctcccccgacctcgggtcccaggtatgctcccacctccacctgccccactcaccacctctgctagttccagacacctcccaagcacgcagcaatgcagctcaaaacgcttagcctagccacacccccacgggaaacagcagtgattaacctttagcaataaacgaaagtttaactaagctatactaaccccagggttggtcaatttcgtgccagccacaccctggagctagcaaaccgctgatcagcctcgactgtgccttctagttgccagccatctgttgtttgcccctcccccgtgccttccttgaccctggaaggtgccactcccactgtcctttcctaataaaatgaggaaattgcatcgcattgtctgagtaggtgtcattctattctggggggtggggtggggcaggacagcaagggggaggattgggaagacaatagcaggcatgctggggatgcggtgggctctatggcttctgaggcggaaagaaccagctggggctctagggggtatccccacgcgccctgtagcggcgcattaagcgcggcgggtgtggtggttacgcgcagcgtgaccgctacacttgccagcgccctagcgcccgctcctttcgctttcttcccttcctttctcgccacgttcgccggctttccccgtcaagctctaaatcgggggctccctttagggttccgatttagtgctttacggcacctcgaccccaaaaaacttgattagggtgatggttcacgtagtgggccatcgccctgatagacggtttttcgccctttgacgttggagtccacgttctttaatagtggactcttgttccaaactggaacaacactcaaccctatctcggtctattcttttgatttataagggattttgccgatttcggcctattggttaaaaaatgagctgatttaacaaaaatttaacgcgaattaattctgtggaatgtgtgtcagttagggtgtggaaagtccccaggctccccagcaggcagaagtatgcaaagcatgcatctcaattagtcagcaaccaggtgtggaaagtccccaggctccccagcaggcagaagtatgcaaagcatgcatctcaattagtcagcaaccatagtcccgcccctaactccgcccatcccgcccctaactccgcccagttccgcccattctccgccccatggctgactaattttttttatttatgcagaggccgaggccgcctctgcctctgagctattccagaagtagtgaggaggcttttttggaggcctaggcttttgcaaaaagctcccgggagcttgtatatccattttcggatctgatcaagagacaggatgaggatcgtttcgcatgattgaacaagatggattgcacgcaggttctccggccgcttgggtggagaggctattcggctatgactgggcacaacagacaatcggctgctctgatgccgccgtgttccggctgtcagcgcaggggcgcccggttctttttgtcaagaccgacctgtccggtgccctgaatgaactgcaggacgaggcagcgcggctatcgtggctggccacgacgggcgttccttgcgcagctgtgctcgacgttgtcactgaagcgggaagggactggctgctattgggcgaagtgccggggcaggatctcctgtcatctcaccttgctcctgccgagaaagtatccatcatggctgatgcaatgcggcggctgcatacgcttgatccggctacctgcccattcgaccaccaagcgaaacatcgcatcgagcgagcacgtactcggatggaagccggtcttgtcgatcaggatgatctggacgaagagcatcaggggctcgcgccagccgaactgttcgccaggctcaaggcgcgcatgcccgacggcgaggatctcgtcgtgacccatggcgatgcctgcttgccgaatatcatggtggaaaatggccgcttttctggattcatcgactgtggccggctgggtgtggcggaccgctatcaggacatagcgttggctacccgtgatattgctgaagagcttggcggcgaatgggctgaccgcttcctcgtgctttacggtatcgccgctcccgattcgcagcgcatcgccttctatcgccttcttgacgagttcttctgagcgggactctggggttcgaaatgaccgaccaagcgacgcccaacctgccatcacgagatttcgattccaccgccgccttctatgaaaggttgggcttcggaatcgttttccgggacgccggctggatgatcctccagcgcggggatctcatgctggagttcttcgcccaccccaacttgtttattgcagcttataatggttacaaataaagcaatagcatcacaaatttcacaaataaagcatttttttcactgcattctagttgtggtttgtccaaactcatcaatgtatcttatcatgtctgtataccgtcgacctctagctagagcttggcgtaatcatggtcatagctgtttcctgtgtgaaattgttatccgctcacaattccacacaacatacgagccggaagcataaagtgtaaagcctggggtgcctaatgagtgagctaactcacattaattgcgttgcgctcactgcccgctttccagtcgggaaacctgtcgtgccagctgcattaatgaatcggccaacgcgcggggagaggcggtttgcgtattgggcgctcttccgcttcctcgctcactgactcgctgcgctcggtcgttcggctgcggcgagcggtatcagctcactcaaaggcggtaatacggttatccacagaatcaggggataacgcaggaaagaacatgtgagcaaaaggccagcaaaaggccaggaaccgtaaaaaggccgcgttgctggcgtttttccataggctccgcccccctgacgagcatcacaaaaatcgacgctcaagtcagaggtggcgaaacccgacaggactataaagataccaggcgtttccccctggaagctccctcgtgcgctctcctgttccgaccctgccgcttaccggatacctgtccgcctttctcccttcgggaagcgtggcgctttctcatagctcacgctgtaggtatctcagttcggtgtaggtcgttcgctccaagctgggctgtgtgcacgaaccccccgttcagcccgaccgctgcgccttatccggtaactatcgtcttgagtccaacccggtaagacacgacttatcgccactggcagcagccactggtaacaggattagcagagcgaggtatgtaggcggtgctacagagttcttgaagtggtggcctaactacggctacactagaagaacagtatttggtatctgcgctctgctgaagccagttaccttcggaaaaagagttggtagctcttgatccggcaaacaaaccaccgctggtagcggtggtttttttgtttgcaagcagcagattacgcgcagaaaaaaaggatctcaagaagatcctttgatcttttctacggggtctgacgctcagtggaacgaaaactcacgttaagggattttggtcatgagattatcaaaaaggatcttcacctagatccttttaaattaaaaatgaagttttaaatcaatctaaagtatatatgagtaaacttggtctgacagttaccaatgcttaatcagtgaggcacctatctcagcgatctgtctatttcgttcatccatagttgcctgactccccgtcgtgtagataactacgatacgggagggcttaccatctggccccagtgctgcaatgataccgcgagacccacgctcaccggctccagatttatcagcaataaaccagccagccggaagggccgagcgcagaagtggtcctgcaactttatccgcctccatccagtctattaattgttgccgggaagctagagtaagtagttcgccagttaatagtttgcgcaacgttgttgccattgctacaggcatcgtggtgtcacgctcgtcgtttggtatggcttcattcagctccggttcccaacgatcaaggcgagttacatgatcccccatgttgtgcaaaaaagcggttagctccttcggtcctccgatcgttgtcagaagtaagttggccgcagtgttatcactcatggttatggcagcactgcataattctcttactgtcatgccatccgtaagatgcttttctgtgactggtgagtactcaaccaagtcattctgagaatagtgtatgcggcgaccgagttgctcttgcccggcgtcaatacgggataataccgcgccacatagcagaactttaaaagtgctcatcattggaaaacgttcttcggggcgaaaactctcaaggatcttaccgctgttgagatccagttcgatgtaacccactcgtgcacccaactgatcttcagcatcttttactttcaccagcgtttctgggtgagcaaaaacaggaaggcaaaatgccgcaaaaaagggaataagggcgacacggaaatgttgaatactcatactcttcctttttcaatattattgaagcatttatcagggttattgtctcatgagcggatacatatttgaatgtatttagaaaaataaacaaataggggttccgcgcacatttccccgaaaagtgccacctgacgtc

SEQ ID NO: 42 - DNA, 9493 bp, synthetic construct
  misc_feature 1..9493: note = pVP36b SARS CoV 2 UTR Spike Delta Hexapro
  source 1..9493: mol_type = other DNA
gacggatcgggagatctcccgatcccctatggtgcactctcagtacaatctgctctgatgccgcatagttaagccagtatctgctccctgcttgtgtgttggaggtcgctgagtagtgcgcgagcaaaatttaagctacaacaaggcaaggcttgaccgacaattgcatgaagaatctgcttagggttaggcgttttgcgctgcttcgcgatgtacgggccagatatacgcgttgacattgattattgactagttattaatagtaatcaattacggggtcattagttcatagcccatatatggagttccgcgttacataacttacggtaaatggcccgcctggctgaccgcccaacgacccccgcccattgacgtcaataatgacgtatgttcccatagtaacgccaatagggactttccattgacgtcaatgggtggagtatttacggtaaactgcccacttggcagtacatcaagtgtatcatatgccaagtacgccccctattgacgtcaatgacggtaaatggcccgcctggcattatgcccagtacatgaccttatgggactttcctacttggcagtacatctacgtattagtcatcgctattaccatggtgatgcggttttggcagtacatcaatgggcgtggatagcggtttgactcacggggatttccaagtctccaccccattgacgtcaatgggagtttgttttggcaccaaaatcaacgggactttccaaaatgtcgtaacaactccgccccattgacgcaaatgggcggtaggcgtgtacggtgggaggtctatataagcagagctctctggctaactagagaacccactgcttactggcttatcgaaattaatacgactcactatagggagacccaagctggctagccaccgagaataaactagtattcttctggtccccacagactcagagagaacccgccaccatgtttgtgttcctggtgctgctgccactggtgtccagccagtgtgtgaacctgaggaccaggacccaacttcctcctgcctacaccaactccttcaccaggggagtctactaccctgacaaggtgttcaggtcctctgtgctgcacagcacccaggacctgttcctgccattcttcagcaatgtgacctggttccatgccatccatgtgtctggcaccaatggcaccaagaggtttgacaaccctgtgctgccattcaatgatggagtctactttgccagcacagagaagagcaacatcatcaggggctggatttttggcaccaccctggacagcaagacccagtccctgctgattgtgaacaatgccaccaatgtggtgattaaggtgtgtgagttccagttctgtaatgacccattcctggacgtctactaccacaagaacaacaagtcctggatggagtctggcgtctactcctctgccaacaactgtacctttgaatatgtgagccaaccattcctgatggacttggagggcaagcagggcaacttcaagaacctgagggagtttgtgttcaagaacattgatggctacttcaagatttacagcaaacacacaccaatcaacctggtgagggacctgccacagggcttctctgccttggaaccactggtggacctgccaattggcatcaacatcaccaggttccagaccctgctggctctgcacaggtcctacctgacacctggagactcctcctctggctggacagcaggagcagcagcctactatgtgggctacctccaaccaaggaccttcctgctgaaatacaatgagaatggcaccatcacagatgctgtggactgtgccctggacccactgtctgagaccaagtgtaccctgaaatccttcacagtggagaagggcatctaccagaccagcaacttcagggtccaaccaacagagagcattgtgaggtttccaaacatcaccaacctgtgtccatttggagaggtgttcaatgccaccaggtttgcctctgtctatgcctggaacaggaagaggattagcaactgtgtggctgactactctgtgctctacaactctgcctccttcagcaccttcaagtgttatggagtgagcccaaccaaactgaatgacctgtgtttcaccaatgtctatgctgactcctttgtgattaggggagatgaggtgagacagattgcccctggacaaacaggcaagattgctgactacaactacaaactgcctgatgacttcacaggctgtgtgattgcctggaacagcaacaacctggacagcaaggtgggaggcaactacaactacaggtacagactgttcaggaagagcaacctgaaaccatttgagagggacatcagcacagagatttaccaggctggcagcaagccatgtaatggagtggagggcttcaactgttactttccactccaatcctatggcttccaaccaaccaatggagtgggctaccaaccatacagggtggtggtgctgtcctttgaactgctccatgcccctgccacagtgtgtggaccaaagaagagcaccaacctggtgaagaacaagtgtgtgaacttcaacttcaatggactgacaggcacaggagtgctgacagagagcaacaagaagttcctgccattccaacagtttggcagggacattgctgacaccacagatgctgtgagggacccacagaccttggagattctggacatcacaccatgttcctttggaggagtgtctgtgattacacctggcaccaacaccagcaaccaggtggctgtgctctaccagggcgtgaactgtactgaggtgcctgtggctatccatgctgaccaacttacaccaacctggagggtctacagcacaggaagcaacgtgttccagaccagggctggctgtctgattggagcagagcatgtgaacaactcctatgagtgtgacatcccaattggagcaggcatctgtgcctcctaccagacccagaccaacagcaggggctctgcatcttctgtggcaagccagagcatcattgcctacacaatgagtctgggagcagagaactctgtggcttacagcaacaacagcattgccatcccaaccaacttcaccatctctgtgaccacagagattctgcctgtgagtatgaccaagacctctgtggactgtacaatgtatatctgtggagacagcacagagtgtagcaacctgctgctccaatatggctccttctgtacccaacttaacagggctctgacaggcattgctgtggaacaggacaagaacacccaggaggtgtttgcccaggtgaagcagatttacaagacacctccaatcaaggactttggaggcttcaacttcagccagattctgcctgacccaagcaagccaagcaagaggtcccctattgaggacctgctgttcaacaaggtgaccctggctgatgctggcttcatcaagcaatatggagactgtctgggagacattgccgccagggacctgatttgtgcccagaagttcaatggactgacagtgctgcctccactgctgacagatgagatgattgcccaatacacctctgccctgctggctggcaccatcacctctggctggacctttggagcaggaccagccctccaaatcccatttccaatgcagatggcttacaggttcaatggcattggagtgacccagaatgtgctctatgagaaccagaaactgattgccaaccagttcaactctgccattggcaagattcaggactccctgtccagcacaccatctgccctgggcaaactccaaaacgtggtgaaccagaatgcccaggctctgaacaccctggtgaagcaactttccagcaactttggagccatctcctctgtgctgaatgacatcctgagcagactggacccaccagaggctgaggtccagattgacagactgattacaggcagactccaatccctccaaacctatgtgacccaacaacttatcagggctgctgagattagggcatctgccaacctggctgccaccaagatgagtgagtgtgtgctgggacaaagcaagagggtggacttctgtggcaagggctaccacctgatgagttttccacagtctgcccctcatggagtggtgttcctgcatgtgacctatgtgcctgcccaggagaagaacttcaccacagcccctgccatctgccatgatggcaaggctcactttccaagggagggagtgtttgtgagcaatggcacccactggtttgtgacccagaggaacttctatgaaccacagattatcaccacagacaacacctttgtgtctggcaactgtgatgtggtgattggcattgtgaacaacacagtctatgacccactccaacctgaactggactccttcaaggaggaactggacaaatacttcaagaaccacaccagccctgatgtggacctgggagacatctctggcatcaatgcctctgtggtgaacatccagaaggagattgacagactgaatgaggtggctaagaacctgaatgagtccctgattgacctccaagaactgggcaaatatgaacaatacatcaagtggccatggtacatctggctgggcttcattgctggactgattgccattgtgatggtgaccataatgctgtgttgtatgacctcctgttgttcctgtctgaaaggctgttgttcctgtggctcctgttgtaagtttgatgaggatgactctgaacctgtgctgaaaggagtgaaactgcactacacctgactcgagctggtactgcatgcacgcaatgctagctgcccctttcccgtcctgggtaccccgagtctcccccgacctcgggtcccaggtatgctcccacctccacctgccccactcaccacctctgctagttccagacacctcccaagcacgcagcaatgcagctcaaaacgcttagcctagccacacccccacgggaaacagcagtgattaacctttagcaataaacgaaagtttaactaagctatactaaccccagggttggtcaatttcgtgccagccacaccctggagctagcaaaccgctgatcagcctcgactgtgccttctagttgccagccatctgttgtttgcccctcccccgtgccttccttgaccctggaaggtgccactcccactgtcctttcctaataaaatgaggaaattgcatcgcattgtctgagtaggtgtcattctattctggggggtggggtggggcaggacagcaagggggaggattgggaagacaatagcaggcatgctggggatgcggtgggctctatggcttctgaggcggaaagaaccagctggggctctagggggtatccccacgcgccctgtagcggcgcattaagcgcggcgggtgtggtggttacgcgcagcgtgaccgctacacttgccagcgccctagcgcccgctcctttcgctttcttcccttcctttctcgccacgttcgccggctttccccgtcaagctctaaatcgggggctccctttagggttccgatttagtgctttacggcacctcgaccccaaaaaacttgattagggtgatggttcacgtagtgggccatcgccctgatagacggtttttcgccctttgacgttggagtccacgttctttaatagtggactcttgttccaaactggaacaacactcaaccctatctcggtctattcttttgatttataagggattttgccgatttcggcctattggttaaaaaatgagctgatttaacaaaaatttaacgcgaattaattctgtggaatgtgtgtcagttagggtgtggaaagtccccaggctccccagcaggcagaagtatgcaaagcatgcatctcaattagtcagcaaccaggtgtggaaagtccccaggctccccagcaggcagaagtatgcaaagcatgcatctcaattagtcagcaaccatagtcccgcccctaactccgcccatcccgcccctaactccgcccagttccgcccattctccgccccatggctgactaattttttttatttatgcagaggccgaggccgcctctgcctctgagctattccagaagtagtgaggaggcttttttggaggcctaggcttttgcaaaaagctcccgggagcttgtatatccattttcggatctgatcaagagacaggatgaggatcgtttcgcatgattgaacaagatggattgcacgcaggttctccggccgcttgggtggagaggctattcggctatgactgggcacaacagacaatcggctgctctgatgccgccgtgttccggctgtcagcgcaggggcgcccggttctttttgtcaagaccgacctgtccggtgccctgaatgaactgcaggacgaggcagcgcggctatcgtggctggccacgacgggcgttccttgcgcagctgtgctcgacgttgtcactgaagcgggaagggactggctgctattgggcgaagtgccggggcaggatctcctgtcatctcaccttgctcctgccgagaaagtatccatcatggctgatgcaatgcggcggctgcatacgcttgatccggctacctgcccattcgaccaccaagcgaaacatcgcatcgagcgagcacgtactcggatggaagccggtcttgtcgatcaggatgatctggacgaagagcatcaggggctcgcgccagccgaactgttcgccaggctcaaggcgcgcatgcccgacggcgaggatctcgtcgtgacccatggcgatgcctgcttgccgaatatcatggtggaaaatggccgcttttctggattcatcgactgtggccggctgggtgtggcggaccgctatcaggacatagcgttggctacccgtgatattgctgaagagcttggcggcgaatgggctgaccgcttcctcgtgctttacggtatcgccgctcccgattcgcagcgcatcgccttctatcgccttcttgacgagttcttctgagcgggactctggggttcgaaatgaccgaccaagcgacgcccaacctgccatcacgagatttcgattccaccgccgccttctatgaaaggttgggcttcggaatcgttttccgggacgccggctggatgatcctccagcgcggggatctcatgctggagttcttcgcccaccccaacttgtttattgcagcttataatggttacaaataaagcaatagcatcacaaatttcacaaataaagcatttttttcactgcattctagttgtggtttgtccaaactcatcaatgtatcttatcatgtctgtataccgtcgacctctagctagagcttggcgtaatcatggtcatagctgtttcctgtgtgaaattgttatccgctcacaattccacacaacatacgagccggaagcataaagtgtaaagcctggggtgcctaatgagtgagctaactcacattaattgcgttgcgctcactgcccgctttccagtcgggaaacctgtcgtgccagctgcattaatgaatcggccaacgcgcggggagaggcggtttgcgtattgggcgctcttccgcttcctcgctcactgactcgctgcgctcggtcgttcggctgcggcgagcggtatcagctcactcaaaggcggtaatacggttatccacagaatcaggggataacgcaggaaagaacatgtgagcaaaaggccagcaaaaggccaggaaccgtaaaaaggccgcgttgctggcgtttttccataggctccgcccccctgacgagcatcacaaaaatcgacgctcaagtcagaggtggcgaaacccgacaggactataaagataccaggcgtttccccctggaagctccctcgtgcgctctcctgttccgaccctgccgcttaccggatacctgtccgcctttctcccttcgggaagcgtggcgctttctcatagctcacgctgtaggtatctcagttcggtgtaggtcgttcgctccaagctgggctgtgtgcacgaaccccccgttcagcccgaccgctgcgccttatccggtaactatcgtcttgagtccaacccggtaagacacgacttatcgccactggcagcagccactggtaacaggattagcagagcgaggtatgtaggcggtgctacagagttcttgaagtggtggcctaactacggctacactagaagaacagtatttggtatctgcgctctgctgaagccagttaccttcggaaaaagagttggtagctcttgatccggcaaacaaaccaccgctggtagcggtggtttttttgtttgcaagcagcagattacgcgcagaaaaaaaggatctcaagaagatcctttgatcttttctacggggtctgacgctcagtggaacgaaaactcacgttaagggattttggtcatgagattatcaaaaaggatcttcacctagatccttttaaattaaaaatgaagttttaaatcaatctaaagtatatatgagtaaacttggtctgacagttaccaatgcttaatcagtgaggcacctatctcagcgatctgtctatttcgttcatccatagttgcctgactccccgtcgtgtagataactacgatacgggagggcttaccatctggccccagtgctgcaatgataccgcgagacccacgctcaccggctccagatttatcagcaataaaccagccagccggaagggccgagcgcagaagtggtcctgcaactttatccgcctccatccagtctattaattgttgccgggaagctagagtaagtagttcgccagttaatagtttgcgcaacgttgttgccattgctacaggcatcgtggtgtcacgctcgtcgtttggtatggcttcattcagctccggttcccaacgatcaaggcgagttacatgatcccccatgttgtgcaaaaaagcggttagctccttcggtcctccgatcgttgtcagaagtaagttggccgcagtgttatcactcatggttatggcagcactgcataattctcttactgtcatgccatccgtaagatgcttttctgtgactggtgagtactcaaccaagtcattctgagaatagtgtatgcggcgaccgagttgctcttgcccggcgtcaatacgggataataccgcgccacatagcagaactttaaaagtgctcatcattggaaaacgttcttcggggcgaaaactctcaaggatcttaccgctgttgagatccagttcgatgtaacccactcgtgcacccaactgatcttcagcatcttttactttcaccagcgtttctgggtgagcaaaaacaggaaggcaaaatgccgcaaaaaagggaataagggcgacacggaaatgttgaatactcatactcttcctttttcaatattattgaagcatttatcagggttattgtctcatgagcggatacatatttgaatgtatttagaaaaataaacaaataggggttccgcgcacatttccccgaaaagtgccacctgacgtc

SEQ ID NO: 43 - DNA, 9069 bp, synthetic construct
  misc_feature 1..9069: note = pVP37 SARS CoV Pseudovirus spike deltaC 19
  source 1..9069: mol_type = other DNA
gacggatcgggagatctcccgatcccctatggtgcactctcagtacaatctgctctgatgccgcatagttaagccagtatctgctccctgcttgtgtgttggaggtcgctgagtagtgcgcgagcaaaatttaagctacaacaaggcaaggcttgaccgacaattgcatgaagaatctgcttagggttaggcgttttgcgctgcttcgcgatgtacgggccagatatacgcgttgacattgattattgactagttattaatagtaatcaattacggggtcattagttcatagcccatatatggagttccgcgttacataacttacggtaaatggcccgcctggctgaccgcccaacgacccccgcccattgacgtcaataatgacgtatgttcccatagtaacgccaatagggactttccattgacgtcaatgggtggagtatttacggtaaactgcccacttggcagtacatcaagtgtatcatatgccaagtacgccccctattgacgtcaatgacggtaaatggcccgcctggcattatgcccagtacatgaccttatgggactttcctacttggcagtacatctacgtattagtcatcgctattaccatggtgatgcggttttggcagtacatcaatgggcgtggatagcggtttgactcacggggatttccaagtctccaccccattgacgtcaatgggagtttgttttggcaccaaaatcaacgggactttccaaaatgtcgtaacaactccgccccattgacgcaaatgggcggtaggcgtgtacggtgggaggtctatataagcagagctctctggctaactagagaacccactgcttactggcttatcgaaattaatacgactcactatagggagacccaagctggctagccaccatgttcatcttcctgctgttcctgaccctgacctctggctctgacctggacaggtgtaccacctttgatgatgtccaggctccaaactacacccaacacacctccagtatgaggggagtctactaccctgatgagattttcaggtctgacaccctctacctgacccaggacctgttcctgccattctacagcaatgtgacaggcttccacaccatcaaccacacctttgacaaccctgtgattccattcaaggatggcatctactttgctgccacagagaagagcaatgtggtgaggggctgggtgtttggcagcacaatgaacaacaagagccagtctgtgattatcatcaacaacagcaccaatgtggtgattagggcttgtaactttgaactgtgtgacaacccattctttgctgtgagcaagcctatgggcacccagacccacacaatgatttttgacaatgccttcaactgtacctttgaatacatctctgatgccttctccctggatgtgtctgagaagtctggcaacttcaaacacctgagggagtttgtgttcaagaacaaggatggcttcctctatgtctacaagggctaccaaccaattgatgtggtgagggacctgccatctggcttcaacaccctgaaaccaatcttcaaactgccactgggcatcaacatcaccaacttcagggctatcctgacagccttcagccctgcccaggacacctggggcacctctgctgctgcctactttgtgggctacctgaaaccaaccacctttatgctgaaatatgatgagaatggcaccatcacagatgctgtggactgtagccagaacccactggctgaactgaaatgttctgtgaagtcctttgagattgacaagggcatctaccagaccagcaacttcagggtggtgccatctggagatgtggtgaggtttccaaacatcaccaacctgtgtccatttggagaggtgttcaatgccaccaagtttccatctgtctatgcctgggagaggaagaagattagcaactgtgtggctgactactctgtgctctacaacagcaccttcttcagcaccttcaagtgttatggagtgtctgccaccaaactgaatgacctgtgtttcagcaatgtctatgctgactcctttgtggtgaagggagatgatgtgagacagattgcccctggacaaacaggagtgattgctgactacaactacaaactgcctgatgactttatgggctgtgtgctggcttggaacaccaggaacattgatgccaccagcacaggcaactacaactacaaatacagatacctgagacatggcaaactgagaccatttgagagggacatcagcaatgtgccattcagccctgatggcaagccatgtactcctcctgccctgaactgttactggccactgaatgactatggcttctacaccaccacaggcattggctaccaaccatacagggtggtggtgctgtcctttgaactgctgaatgcccctgccacagtgtgtggaccaaaactgagcacagacctgattaagaaccagtgtgtgaacttcaacttcaatggactgacaggcacaggagtgctgacaccatccagcaagaggttccaaccattccaacagtttggcagggatgtgtctgacttcacagactctgtgagggacccaaagacctctgagattctggacatcagcccatgttcctttggaggagtgtctgtgattacacctggcaccaatgcctcctctgaggtggctgtgctctaccaggatgtgaactgtactgatgtgagcacagccatccatgctgaccaacttacacctgcctggaggatttacagcacaggcaacaatgtgttccagacccaggctggctgtctgattggagcagagcatgtggacacctcctatgagtgtgacatcccaattggagcaggcatctgtgcctcctaccacacagtgtccctgctgaggagcaccagccagaagagcattgtggcttacacaatgagtctgggagcagactccagcattgcctacagcaacaacaccattgccatcccaaccaacttcagcatcagcatcaccacagaggtgatgcctgtgagtatggctaagacctctgtggactgtaatatgtatatctgtggagacagcacagagtgtgccaacctgctgctccaatatggctccttctgtacccaacttaacagggctctgtctggcattgctgctgaacaggacaggaacaccagggaggtgtttgcccaggtgaagcagatgtataagacaccaaccctgaaatactttggaggcttcaacttcagccagattctgcctgacccactgaaaccaaccaagaggtccttcattgaggacctgctgttcaacaaggtgaccctggctgatgctggctttatgaagcaatatggagagtgtctgggagacatcaatgccagggacctgatttgtgcccagaagttcaatggactgacagtgctgcctccactgctgacagatgatatgattgctgcctacacagcagccctggtgtctggcacagccacagcaggctggacctttggagcaggagcagccctccaaatcccatttgctatgcagatggcttacaggttcaatggcattggagtgacccagaatgtgctctatgagaaccagaagcagattgccaaccagttcaacaaggctatcagccagattcaggagtccctgaccaccaccagcacagccctgggcaaactccaagatgtggtgaaccagaatgcccaggctctgaacaccctggtgaagcaactttccagcaactttggagccatctcctctgtgctgaatgacatcctgagcagactggacaaggtggaggctgaggtccagattgacagactgattacaggcagactccaatccctccaaacctatgtgacccaacaacttatcagggctgctgagattagggcatctgccaacctggctgccaccaagatgagtgagtgtgtgctgggacaaagcaagagggtggacttctgtggcaagggctaccacctgatgagttttccacaggctgcccctcatggagtggtgttcctgcatgtgacctatgtgccaagccaggagaggaacttcaccacagcccctgccatctgccatgagggcaaggcttactttccaagggagggagtgtttgtgttcaatggcacctcctggttcatcacccagaggaacttcttcagcccacagattatcaccacagacaacacctttgtgtctggcaactgtgatgtggtgattggcatcatcaacaacacagtctatgacccactccaacctgaactggactccttcaaggaggaactggacaaatacttcaagaaccacaccagccctgatgtggacctgggagacatctctggcatcaatgcctctgtggtgaacatccagaaggagattgacagactgaatgaggtggctaagaacctgaatgagtccctgattgacctccaagaactgggcaaatatgaacaatacatcaagtggccatggtatgtgtggctgggcttcattgctggactgattgccattgtgatggtgaccatcctgctgtgttgtatgacctcctgttgttcctgtctgaaaggagcctgttcctgtggctcctgttgttaaggatccgagctcggtaccaagcttaagtttaaaccgctgatcagcctcgactgtgccttctagttgccagccatctgttgtttgcccctcccccgtgccttccttgaccctggaaggtgccactcccactgtcctttcctaataaaatgaggaaattgcatcgcattgtctgagtaggtgtcattctattctggggggtggggtggggcaggacagcaagggggaggattgggaagacaatagcaggcatgctggggatgcggtgggctctatggcttctgaggcggaaagaaccagctggggctctagggggtatccccacgcgccctgtagcggcgcattaagcgcggcgggtgtggtggttacgcgcagcgtgaccgctacacttgccagcgccctagcgcccgctcctttcgctttcttcccttcctttctcgccacgttcgccggctttccccgtcaagctctaaatcgggggctccctttagggttccgatttagtgctttacggcacctcgaccccaaaaaacttgattagggtgatggttcacgtagtgggccatcgccctgatagacggtttttcgccctttgacgttggagtccacgttctttaatagtggactcttgttccaaactggaacaacactcaaccctatctcggtctattcttttgatttataagggattttgccgatttcggcctattggttaaaaaatgagctgatttaacaaaaatttaacgcgaattaattctgtggaatgtgtgtcagttagggtgtggaaagtccccaggctccccagcaggcagaagtatgcaaagcatgcatctcaattagtcagcaaccaggtgtggaaagtccccaggctccccagcaggcagaagtatgcaaagcatgcatctcaattagtcagcaaccatagtcccgcccctaactccgcccatcccgcccctaactccgcccagttccgcccattctccgccccatggctgactaattttttttatttatgcagaggccgaggccgcctctgcctctgagctattccagaagtagtgaggaggcttttttggaggcctaggcttttgcaaaaagctcccgggagcttgtatatccattttcggatctgatcaagagacaggatgaggatcgtttcgcatgattgaacaagatggattgcacgcaggttctccggccgcttgggtggagaggctattcggctatgactgggcacaacagacaatcggctgctctgatgccgccgtgttccggctgtcagcgcaggggcgcccggttctttttgtcaagaccgacctgtccggtgccctgaatgaactgcaggacgaggcagcgcggctatcgtggctggccacgacgggcgttccttgcgcagctgtgctcgacgttgtcactgaagcgggaagggactggctgctattgggcgaagtgccggggcaggatctcctgtcatctcaccttgctcctgccgagaaagtatccatcatggctgatgcaatgcggcggctgcatacgcttgatccggctacctgcccattcgaccaccaagcgaaacatcgcatcgagcgagcacgtactcggatggaagccggtcttgtcgatcaggatgatctggacgaagagcatcaggggctcgcgccagccgaactgttcgccaggctcaaggcgcgcatgcccgacggcgaggatctcgtcgtgacccatggcgatgcctgcttgccgaatatcatggtggaaaatggccgcttttctggattcatcgactgtggccggctgggtgtggcggaccgctatcaggacatagcgttggctacccgtgatattgctgaagagcttggcggcgaatgggctgaccgcttcctcgtgctttacggtatcgccgctcccgattcgcagcgcatcgccttctatcgccttcttgacgagttcttctgagcgggactctggggttcgaaatgaccgaccaagcgacgcccaacctgccatcacgagatttcgattccaccgccgccttctatgaaaggttgggcttcggaatcgttttccgggacgccggctggatgatcctccagcgcggggatctcatgctggagttcttcgcccaccccaacttgtttattgcagcttataatggttacaaataaagcaatagcatcacaaatttcacaaataaagcatttttttcactgcattctagttgtggtttgtccaaactcatcaatgtatcttatcatgtctgtataccgtcgacctctagctagagcttggcgtaatcatggtcatagctgtttcctgtgtgaaattgttatccgctcacaattccacacaacatacgagccggaagcataaagtgtaaagcctggggtgcctaatgagtgagctaactcacattaattgcgttgcgctcactgcccgctttccagtcgggaaacctgtcgtgccagctgcattaatgaatcggccaacgcgcggggagaggcggtttgcgtattgggcgctcttccgcttcctcgctcactgactcgctgcgctcggtcgttcggctgcggcgagcggtatcagctcactcaaaggcggtaatacggttatccacagaatcaggggataacgcaggaaagaacatgtgagcaaaaggccagcaaaaggccaggaaccgtaaaaaggccgcgttgctggcgtttttccataggctccgcccccctgacgagcatcacaaaaatcgacgctcaagtcagaggtggcgaaacccgacaggactataaagataccaggcgtttccccctggaagctccctcgtgcgctctcctgttccgaccctgccgcttaccggatacctgtccgcctttctcccttcgggaagcgtggcgctttctcatagctcacgctgtaggtatctcagttcggtgtaggtcgttcgctccaagctgggctgtgtgcacgaaccccccgttcagcccgaccgctgcgccttatccggtaactatcgtcttgagtccaacccggtaagacacgacttatcgccactggcagcagccactggtaacaggattagcagagcgaggtatgtaggcggtgctacagagttcttgaagtggtggcctaactacggctacactagaagaacagtatttggtatctgcgctctgctgaagccagttaccttcggaaaaagagttggtagctcttgatccggcaaacaaaccaccgctggtagcggtggtttttttgtttgcaagcagcagattacgcgcagaaaaaaaggatctcaagaagatcctttgatcttttctacggggtctgacgctcagtggaacgaaaactcacgttaagggattttggtcatgagattatcaaaaaggatcttcacctagatccttttaaattaaaaatgaagttttaaatcaatctaaagtatatatgagtaaacttggtctgacagttaccaatgcttaatcagtgaggcacctatctcagcgatctgtctatttcgttcatccatagttgcctgactccccgtcgtgtagataactacgatacgggagggcttaccatctggccccagtgctgcaatgataccgcgagacccacgctcaccggctccagatttatcagcaataaaccagccagccggaagggccgagcgcagaagtggtcctgcaactttatccgcctccatccagtctattaattgttgccgggaagctagagtaagtagttcgccagttaatagtttgcgcaacgttgttgccattgctacaggcatcgtggtgtcacgctcgtcgtttggtatggcttcattcagctccggttcccaacgatcaaggcgagttacatgatcccccatgttgtgcaaaaaagcggttagctccttcggtcctccgatcgttgtcagaagtaagttggccgcagtgttatcactcatggttatggcagcactgcataattctcttactgtcatgccatccgtaagatgcttttctgtgactggtgagtactcaaccaagtcattctgagaatagtgtatgcggcgaccgagttgctcttgcccggcgtcaatacgggataataccgcgccacatagcagaactttaaaagtgctcatcattggaaaacgttcttcggggcgaaaactctcaaggatcttaccgctgttgagatccagttcgatgtaacccactcgtgcacccaactgatcttcagcatcttttactttcaccagcgtttctgggtgagcaaaaacaggaaggcaaaatgccgcaaaaaagggaataagggcgacacggaaatgttgaatactcatactcttcctttttcaatattattgaagcatttatcagggttattgtctcatgagcggatacatatttgaatgtatttagaaaaataaacaaataggggttccgcgcacatttccccgaaaagtgccacctgacgtc

SEQ ID NO: 44 - DNA, 9372 bp, synthetic construct
  misc_feature 1..9372: note = pVP38 MERS CoV Pseudovirus spike deltaC 19
  source 1..9372: mol_type = other DNA
gacggatcgggagatctcccgatcccctatggtgcactctcagtacaatctgctctgatgccgcatagttaagccagtatctgctccctgcttgtgtgttggaggtcgctgagtagtgcgcgagcaaaatttaagctacaacaaggcaaggcttgaccgacaattgcatgaagaatctgcttagggttaggcgttttgcgctgcttcgcgatgtacgggccagatatacgcgttgacattgattattgactagttattaatagtaatcaattacggggtcattagttcatagcccatatatggagttccgcgttacataacttacggtaaatggcccgcctggctgaccgcccaacgacccccgcccattgacgtcaataatgacgtatgttcccatagtaacgccaatagggactttccattgacgtcaatgggtggagtatttacggtaaactgcccacttggcagtacatcaagtgtatcatatgccaagtacgccccctattgacgtcaatgacggtaaatggcccgcctggcattatgcccagtacatgaccttatgggactttcctacttggcagtacatctacgtattagtcatcgctattaccatggtgatgcggttttggcagtacatcaatgggcgtggatagcggtttgactcacggggatttccaagtctccaccccattgacgtcaatgggagtttgttttggcaccaaaatcaacgggactttccaaaatgtcgtaacaactccgccccattgacgcaaatgggcggtaggcgtgtacggtgggaggtctatataagcagagctctctggctaactagagaacccactgcttactggcttatcgaaattaatacgactcactatagggagacccaagctggctagccaccatgattcactctgtgttcctgctgatgttcctgctgacaccaacagagtcctatgtggatgtgggacctgactctgtgaagtctgcctgtattgaggtggacatccaacagaccttctttgacaagacctggccaagaccaattgatgtgagcaaggctgatggcatcatctacccacagggcaggacctacagcaacatcaccatcacctaccagggactgtttccataccagggagatcatggagatatgtatgtctactctgctggtcatgccacaggcaccacaccacagaaactgtttgtggctaactacagccaggatgtgaagcagtttgccaatggctttgtggtgaggattggagcagcagccaacagcacaggcacagtgattatcagcccaagcacctctgccaccatcaggaagatttaccctgcctttatgctgggctcctctgtgggcaacttctctgatggcaagatgggcaggttcttcaaccacaccctggtgctgctgcctgatggctgtggcaccctgctgagggctttctactgtatcttggaaccaaggtctggcaaccactgtcctgctggcaactcctacacctcctttgccacctaccacacacctgccacagactgttctgatggcaactacaacaggaatgcctccctgaactccttcaaggaatacttcaacctgaggaactgtacctttatgtacacctacaacatcacagaggatgagattttggagtggtttggcatcacccagacagcccagggagtgcatctgttctcgagcagatatgtggacctctatggaggcaatatgttccagtttgccaccctgcctgtctatgacaccatcaaatactacagcatcatcccacacagcatcaggagcatccagtctgacaggaaggcttgggctgccttctatgtctacaaactccaaccactgaccttcctgctggacttctctgtggatggctacatcaggagggctattgactgtggcttcaatgacctgagccaacttcactgttcctatgagtcctttgatgtggagtctggagtctactctgtgtcctcctttgaggctaagccatctggctctgtggtggaacaggctgagggagtggagtgtgacttcagcccactgctgtctggcacacctccacaggtctacaacttcaagagactggtgttcaccaactgtaactacaacctgaccaaactgctgtccctgttctctgtgaatgacttcacttgtagccagattagccctgctgccattgccagcaactgttactcctccctgattctggactacttctcctacccactgagtatgaagtctgacctgtctgtgtcctctgctggaccaatcagccagttcaactacaagcagtccttcagcaacccaacttgtctgattctggctacagtgccacacaacctgaccaccatcaccaagccactgaaatactcctacatcaacaagtgtagcagactgctgtctgatgacaggacagaggtgccacaactagtgaatgccaaccaatacagcccatgtgtgagcattgtgccaagcacagtgtgggaggatggagactactacaggaagcaacttagcccattggagggaggaggctggctggtggcatctggcagcacagtggctatgacagaacaactccaaatgggctttggcatcacagtccaatatggcacagacaccaactctgtgtgtccaaaattggagtttgccaatgacaccaagattgccagccaacttggcaactgtgtggaatactccctctatggagtgtctggcaggggagtgttccagaactgtactgctgtgggagtgagacaacagaggtttgtctatgatgcctaccagaacctggtgggctactactctgatgatggcaactactactgtctgagggcttgtgtgtctgtgcctgtgtctgtgatttatgacaaggagaccaagacccatgccaccctgtttggctctgtggcttgtgaacacatctccagcacaatgagtcaatacagcaggagcaccaggagtatgctgaaaaggagggacagcacatatggaccactccaaacacctgtgggctgtgtgctgggactggtgaactcctccctgtttgtggaggactgtaaactgccactgggacaatccctgtgtgccctgcctgacacaccaagcaccctgacaccaaggtctgtgaggtctgtgcctggagagatgagactggcaagcattgccttcaaccacccaatccaggtggaccaacttaactcctcctacttcaaactgagcatcccaaccaacttctcctttggagtgacccaggaatacatccagaccaccatccagaaggtgacagtggactgtaagcaatatgtgtgtaatggcttccagaagtgtgaacaacttctgagggaatatggacaattctgtagcaagataaaccaggctcttcatggagccaacctgagacaggatgactctgtgaggaacctgtttgcctctgtgaagtccagccagtccagcccaatcatccctggctttggaggagacttcaacctgaccctgttggaaccggtgagcatcagcacaggcagcaggtctgccaggtctgccattgaggacctgctgtttgacaaggtgaccattgctgaccctggctatatgcagggctatgatgactgtatgcaacagggacctgcctctgccagggacctgatttgtgcccaatatgtggctggctacaaggtgctgcctccactgatggatgtgaatatggaggctgcctacacctcctccctgctgggcagcattgctggagtgggctggactgcaggactgtcctcctttgctgccatcccatttgcccagagcatcttctacagactgaatggagtgggcatcacccaacaggtgctgtctgagaaccagaaactgattgccaacaagttcaaccaggctctgggagctatgcagacaggcttcaccaccaccaatgaggctttccagaaggtccaggatgctgtgaacaacaatgcccaggctctgagcaaactggcatctgaactgagcaacacctttggagccatctctgctagcattggagacatcatccagagactggatgtgttggaacaggatgcccagattgacagactgataaatggcagactgaccaccctgaatgcctttgtggctcaacaacttgtgaggtctgagtctgctgccctgtctgcccaacttgccaaggacaaggtgaatgagtgtgtgaaggctcaaagcaagaggtctggcttctgtggacaaggcacccacattgtgtcctttgtggtgaatgccccaaatggactctactttatgcatgtgggctactacccaagcaaccacattgaggtggtgtctgcctatggactgtgtgatgctgccaacccaaccaactgtattgcccctgtgaatggctacttcatcaagaccaacaacaccaggattgtggatgagtggtcctacacaggctcctccttctatgcccctgaaccaatcacctccctgaacaccaaatatgtggctccacaggtgacctaccagaacatcagcaccaacctgcctcctccactgctgggcaacagcacaggcattgacttccaggatgaactggatgagttcttcaagaatgtgagcaccagcatcccaaactttggctccctgacccagataaacaccaccctgctggacctgacctatgagatgctgtccctccaacaggtggtgaaggctctgaatgagtcctacattgacctgaaagaactgggcaactacacctactacaacaagtggccatggtacatctggctgggcttcatcgctggcctggtggccctggcgctgtgcgtgttcttcatcctgtgctgcaccggctgcggcaccaactgcatgggcaagctgaagtgcaacaggtgctgctaaggatccgagctcggtaccaagcttaagtttaaaccgctgatcagcctcgactgtgccttctagttgccagccatctgttgtttgcccctcccccgtgccttccttgaccctggaaggtgccactcccactgtcctttcctaataaaatgaggaaattgcatcgcattgtctgagtaggtgtcattctattctggggggtggggtggggcaggacagcaagggggaggattgggaagacaatagcaggcatgctggggatgcggtgggctctatggcttctgaggcggaaagaaccagctggggctctagggggtatccccacgcgccctgtagcggcgcattaagcgcggcgggtgtggtggttacgcgcagcgtgaccgctacacttgccagcgccctagcgcccgctcctttcgctttcttcccttcctttctcgccacgttcgccggctttccccgtcaagctctaaatcgggggctccctttagggttccgatttagtgctttacggcacctcgaccccaaaaaacttgattagggtgatggttcacgtagtgggccatcgccctgatagacggtttttcgccctttgacgttggagtccacgttctttaatagtggactcttgttccaaactggaacaacactcaaccctatctcggtctattcttttgatttataagggattttgccgatttcggcctattggttaaaaaatgagctgatttaacaaaaatttaacgcgaattaattctgtggaatgtgtgtcagttagggtgtggaaagtccccaggctccccagcaggcagaagtatgcaaagcatgcatctcaattagtcagcaaccaggtgtggaaagtccccaggctccccagcaggcagaagtatgcaaagcatgcatctcaattagtcagcaaccatagtcccgcccctaactccgcccatcccgcccctaactccgcccagttccgcccattctccgccccatggctgactaattttttttatttatgcagaggccgaggccgcctctgcctctgagctattccagaagtagtgaggaggcttttttggaggcctaggcttttgcaaaaagctcccgggagcttgtatatccattttcggatctgatcaagagacaggatgaggatcgtttcgcatgattgaacaagatggattgcacgcaggttctccggccgcttgggtggagaggctattcggctatgactgggcacaacagacaatcggctgctctgatgccgccgtgttccggctgtcagcgcaggggcgcccggttctttttgtcaagaccgacctgtccggtgccctgaatgaactgcaggacgaggcagcgcggctatcgtggctggccacgacgggcgttccttgcgcagctgtgctcgacgttgtcactgaagcgggaagggactggctgctattgggcgaagtgccggggcaggatctcctgtcatctcaccttgctcctgccgagaaagtatccatcatggctgatgcaatgcggcggctgcatacgcttgatccggctacctgcccattcgaccaccaagcgaaacatcgcatcgagcgagcacgtactcggatggaagccggtcttgtcgatcaggatgatctggacgaagagcatcaggggctcgcgccagccgaactgttcgccaggctcaaggcgcgcatgcccgacggcgaggatctcgtcgtgacccatggcgatgcctgcttgccgaatatcatggtggaaaatggccgcttttctggattcatcgactgtggccggctgggtgtggcggaccgctatcaggacatagcgttggctacccgtgatattgctgaagagcttggcggcgaatgggctgaccgcttcctcgtgctttacggtatcgccgctcccgattcgcagcgcatcgccttctatcgccttcttgacgagttcttctgagcgggactctggggttcgaaatgaccgaccaagcgacgcccaacctgccatcacgagatttcgattccaccgccgccttctatgaaaggttgggcttcggaatcgttttccgggacgccggctggatgatcctccagcgcggggatctcatgctggagttcttcgcccaccccaacttgtttattgcagcttataatggttacaaataaagcaatagcatcacaaatttcacaaataaagcatttttttcactgcattctagttgtggtttgtccaaactcatcaatgtatcttatcatgtctgtataccgtcgacctctagctagagcttggcgtaatcatggtcatagctgtttcctgtgtgaaattgttatccgctcacaattccacacaacatacgagccggaagcataaagtgtaaagcctggggtgcctaatgagtgagctaactcacattaattgcgttgcgctcactgcccgctttccagtcgggaaacctgtcgtgccagctgcattaatgaatcggccaacgcgcggggagaggcggtttgcgtattgggcgctcttccgcttcctcgctcactgactcgctgcgctcggtcgttcggctgcggcgagcggtatcagctcactcaaaggcggtaatacggttatccacagaatcaggggataacgcaggaaagaacatgtgagcaaaaggccagcaaaaggccaggaaccgtaaaaaggccgcgttgctggcgtttttccataggctccgcccccctgacgagcatcacaaaaatcgacgctcaagtcagaggtggcgaaacccgacaggactataaagataccaggcgtttccccctggaagctccctcgtgcgctctcctgttccgaccctgccgcttaccggatacctgtccgcctttctcccttcgggaagcgtggcgctttctcatagctcacgctgtaggtatctcagttcggtgtaggtcgttcgctccaagctgggctgtgtgcacgaaccccccgttcagcccgaccgctgcgccttatccggtaactatcgtcttgagtccaacccggtaagacacgacttatcgccactggcagcagccactggtaacaggattagcagagcgaggtatgtaggcggtgctacagagttcttgaagtggtggcctaactacggctacactagaagaacagtatttggtatctgcgctctgctgaagccagttaccttcggaaaaagagttggtagctcttgatccggcaaacaaaccaccgctggtagcggtggtttttttgtttgcaagcagcagattacgcgcagaaaaaaaggatctcaagaagatcctttgatcttttctacggggtctgacgctcagtggaacgaaaactcacgttaagggattttggtcatgagattatcaaaaaggatcttcacctagatccttttaaattaaaaatgaagttttaaatcaatctaaagtatatatgagtaaacttggtctgacagttaccaatgcttaatcagtgaggcacctatctcagcgatctgtctatttcgttcatccatagttgcctgactccccgtcgtgtagataactacgatacgggagggcttaccatctggccccagtgctgcaatgataccgcgagacccacgctcaccggctccagatttatcagcaataaaccagccagccggaagggccgagcgcagaagtggtcctgcaactttatccgcctccatccagtctattaattgttgccgggaagctagagtaagtagttcgccagttaatagtttgcgcaacgttgttgccattgctacaggcatcgtggtgtcacgctcgtcgtttggtatggcttcattcagctccggttcccaacgatcaaggcgagttacatgatcccccatgttgtgcaaaaaagcggttagctccttcggtcctccgatcgttgtcagaagtaagttggccgcagtgttatcactcatggttatggcagcactgcataattctcttactgtcatgccatccgtaagatgcttttctgtgactggtgagtactcaaccaagtcattctgagaatagtgtatgcggcgaccgagttgctcttgcccggcgtcaatacgggataataccgcgccacatagcagaactttaaaagtgctcatcattggaaaacgttcttcggggcgaaaactctcaaggatcttaccgctgttgagatccagttcgatgtaacccactcgtgcacccaactgatcttcagcatcttttactttcaccagcgtttctgggtgagcaaaaacaggaaggcaaaatgccgcaaaaaagggaataagggcgacacggaaatgttgaatactcatactcttcctttttcaatattattgaagcatttatcagggttattgtctcatgagcggatacatatttgaatgtatttagaaaaataaacaaataggggttccgcgcacatttccccgaaaagtgccacctgacgtc

SEQ ID NO: 45 - DNA, 9117 bp, synthetic construct
  misc_feature 1..9117: note = pVP40 SARS-CoV-2 spike delta variant del19
  source 1..9117: mol_type = other DNA
gacggatcgggagatctcccgatcccctatggtgcactctcagtacaatctgctctgatgccgcatagttaagccagtatctgctccctgcttgtgtgttggaggtcgctgagtagtgcgcgagcaaaatttaagctacaacaaggcaaggcttgaccgacaattgcatgaagaatctgcttagggttaggcgttttgcgctgcttcgcgatgtacgggccagatatacgcgttgacattgattattgactagttattaatagtaatcaattacggggtcattagttcatagcccatatatggagttccgcgttacataacttacggtaaatggcccgcctggctgaccgcccaacgacccccgcccattgacgtcaataatgacgtatgttcccatagtaacgccaatagggactttccattgacgtcaatgggtggagtatttacggtaaactgcccacttggcagtacatcaagtgtatcatatgccaagtacgccccctattgacgtcaatgacggtaaatggcccgcctggcattatgcccagtacatgaccttatgggactttcctacttggcagtacatctacgtattagtcatcgctattaccatggtgatgcggttttggcagtacatcaatgggcgtggatagcggtttgactcacggggatttccaagtctccaccccattgacgtcaatgggagtttgttttggcaccaaaatcaacgggactttccaaaatgtcgtaacaactccgccccattgacgcaaatgggcggtaggcgtgtacggtgggaggtctatataagcagagctctctggctaactagagaacccactgcttactggcttatcgaaattaatacgactcactatagggagacccaagctggctagccaccatgtttgtgttcctggtgctgctgccactggtgtccagccagtgtgtgaacctgaggaccaggacccaacttcctcctgcctacaccaactccttcaccaggggagtctactaccctgacaaggtgttcaggtcctctgtgctgcacagcacccaggacctgttcctgccattcttcagcaatgtgacctggttccatgccatccatgtgtctggcaccaatggcaccaagaggtttgacaaccctgtgctgccattcaatgatggagtctactttgccagcacagagaagagcaacatcatcaggggctggatttttggcaccaccctggacagcaagacccagtccctgctgattgtgaacaatgccaccaatgtggtgattaaggtgtgtgagttccagttctgtaatgacccattcctggacgtctactaccacaagaacaacaagtcctggatggagtctggcgtctactcctctgccaacaactgtacctttgaatatgtgagccaaccattcctgatggacttggagggcaagcagggcaacttcaagaacctgagggagtttgtgttcaagaacattgatggctacttcaagatttacagcaaacacacaccaatcaacctggtgagggacctgccacagggcttctctgccttggaaccactggtggacctgccaattggcatcaacatcaccaggttccagaccctgctggctctgcacaggtcctacctgacacctggagactcctcctctggctggacagcaggagcagcagcctactatgtgggctacctccaaccaaggaccttcctgctgaaatacaatgagaatggcaccatcacagatgctgtggactgtgccctggacccactgtctgagaccaagtgtaccctgaaatccttcacagtggagaagggcatctaccagaccagcaacttcagggtccaaccaacagagagcattgtgaggtttccaaacatcacaaacctgtgtccatttggagaggtgttcaatgccaccaggtttgcctctgtctatgcctggaacaggaagaggattagcaactgtgtggctgactactctgtgctctacaactctgcctccttcagcaccttcaagtgttatggagtgagcccaaccaaactgaatgacctgtgtttcaccaatgtctatgctgactcctttgtgattaggggagatgaggtgagacagattgcccctggacaaacaggcaagattgctgactacaactacaaactgcctgatgacttcacaggctgtgtgattgcctggaacagcaacaacctggacagcaaggtgggaggcaactacaactacaggtacagactgttcaggaagagcaacctgaaaccatttgagagggacatcagcacagagatttaccaggctggcagcaagccatgtaatggagtggagggcttcaactgttactttccactccaatcctatggcttccaaccaaccaatggagtgggctaccaaccatacagggtggtggtgctgtcctttgaactgctccatgcccctgccacagtgtgtggaccaaagaagagcacaaacctggtgaagaacaagtgtgtgaacttcaacttcaatggactgacaggcacaggagtgctgacagagagcaacaagaagttcctgccattccaacagtttggcagggacattgctgacaccacagatgctgtgagggacccacagaccttggagattctggacatcacaccatgttcctttggaggagtgtctgtgattacacctggcaccaacaccagcaaccaggtggctgtgctctaccagggcgtgaactgtactgaggtgcctgtggctatccatgctgaccaacttaccccaacctggagggtctacagcacaggcagcaacgtgttccagaccagggctggctgtctgattggagcagagcatgtgaacaactcctatgagtgtgacatcccaattggagcaggcatctgtgcctcctaccagacccagaccaacagcaggaggagggcaaggtctgtggcaagccagagcatcattgcctacacaatgagtctgggagcagagaactctgtggcttacagcaacaacagcattgccatcccaaccaacttcaccatctctgtgaccacagagattctgcctgtgagtatgaccaagacctctgtggactgtacaatgtatatctgtggagacagcacagagtgtagcaacctgctgctccaatatggctccttctgtacccaacttaacagggctctgacaggcattgctgtggaacaggacaagaacacccaggaggtgttcgcccaagtgaagcagatttacaagacacctccaatcaaggactttggaggcttcaacttcagccagattctgcctgacccaagcaagccaagcaagaggtccttcattgaggacctgctgttcaacaaggtgaccctggctgatgctggcttcatcaagcaatatggagactgtctgggagacattgccgccagggacctgatttgtgcccagaagttcaatggactgacagtgctgcctccactgctgacagatgagatgattgcccaatacacctctgccctgctggctggcaccatcacctctggctggacctttggagcaggagcagccctccaaatcccatttgctatgcagatggcttacaggttcaatggcattggagtgacccagaatgtgctctatgagaaccagaaactgattgccaaccagttcaactctgccattggcaagattcaggactccctgtccagcacagcctctgccctgggcaagctccaaaacgtggtgaaccagaatgcccaggctctgaacaccctggtgaagcaactttccagcaactttggagccatctcctctgtgctgaatgacatcctgagcagactggacaaggtggaggctgaggtccagattgacagactgattacaggcagactccaatccctccaaacctatgtgacccaacaacttatcagggctgctgagattagggcatctgccaacctggctgccaccaagatgagtgagtgtgtgctgggacaaagcaagagggtggacttctgtggcaagggctaccacctgatgagttttccacagtctgcccctcatggagtggtgttcctgcatgtgacctatgtgcctgcccaggagaagaacttcaccacagcccctgccatctgccatgatggcaaggctcactttccaagggagggagtgtttgtgagcaatggcacccactggtttgtgacccagaggaacttctatgaaccacagattatcaccacagacaacacctttgtgtctggcaactgtgatgtggtgattggcattgtgaacaacacagtctatgacccactccagcctgaactggactccttcaaggaggaactggacaaatacttcaagaaccacaccagccctgatgtggacctgggagacatctctggcatcaatgcctctgtggtgaacatccagaaggagattgacagactgaatgaggtggctaagaacctgaatgagtccctgattgacctccaagaactgggcaaatatgaacaatacatcaagtggccatggtacatctggctgggcttcattgctggactgattgccattgtgatggtgaccataatgctgtgttgtatgacctcctgttgttcctgtctgaaaggctgttgttcctgtggctcctgttgttgaggatccgagctcggtaccaagcttaagtttaaaccgctgatcagcctcgactgtgccttctagttgccagccatctgttgtttgcccctcccccgtgccttccttgaccctggaaggtgccactcccactgtcctttcctaataaaatgaggaaattgcatcgcattgtctgagtaggtgtcattctattctggggggtggggtggggcaggacagcaagggggaggattgggaagacaatagcaggcatgctggggatgcggtgggctctatggcttctgaggcggaaagaaccagctggggctctagggggtatccccacgcgccctgtagcggcgcattaagcgcggcgggtgtggtggttacgcgcagcgtgaccgctacacttgccagcgccctagcgcccgctcctttcgctttcttcccttcctttctcgccacgttcgccggctttccccgtcaagctctaaatcgggggctccctttagggttccgatttagtgctttacggcacctcgaccccaaaaaacttgattagggtgatggttcacgtagtgggccatcgccctgatagacggtttttcgccctttgacgttggagtccacgttctttaatagtggactcttgttccaaactggaacaacactcaaccctatctcggtctattcttttgatttataagggattttgccgatttcggcctattggttaaaaaatgagctgatttaacaaaaatttaacgcgaattaattctgtggaatgtgtgtcagttagggtgtggaaagtccccaggctccccagcaggcagaagtatgcaaagcatgcatctcaattagtcagcaaccaggtgtggaaagtccccaggctccccagcaggcagaagtatgcaaagcatgcatctcaattagtcagcaaccatagtcccgcccctaactccgcccatcccgcccctaactccgcccagttccgcccattctccgccccatggctgactaattttttttatttatgcagaggccgaggccgcctctgcctctgagctattccagaagtagtgaggaggcttttttggaggcctaggcttttgcaaaaagctcccgggagcttgtatatccattttcggatctgatcaagagacaggatgaggatcgtttcgcatgattgaacaagatggattgcacgcaggttctccggccgcttgggtggagaggctattcggctatgactgggcacaacagacaatcggctgctctgatgccgccgtgttccggctgtcagcgcaggggcgcccggttctttttgtcaagaccgacctgtccggtgccctgaatgaactgcaggacgaggcagcgcggctatcgtggctggccacgacgggcgttccttgcgcagctgtgctcgacgttgtcactgaagcgggaagggactggctgctattgggcgaagtgccggggcaggatctcctgtcatctcaccttgctcctgccgagaaagtatccatcatggctgatgcaatgcggcggctgcatacgcttgatccggctacctgcccattcgaccaccaagcgaaacatcgcatcgagcgagcacgtactcggatggaagccggtcttgtcgatcaggatgatctggacgaagagcatcaggggctcgcgccagccgaactgttcgccaggctcaaggcgcgcatgcccgacggcgaggatctcgtcgtgacccatggcgatgcctgcttgccgaatatcatggtggaaaatggccgcttttctggattcatcgactgtggccggctgggtgtggcggaccgctatcaggacatagcgttggctacccgtgatattgctgaagagcttggcggcgaatgggctgaccgcttcctcgtgctttacggtatcgccgctcccgattcgcagcgcatcgccttctatcgccttcttgacgagttcttctgagcgggactctggggttcgaaatgaccgaccaagcgacgcccaacctgccatcacgagatttcgattccaccgccgccttctatgaaaggttgggcttcggaatcgttttccgggacgccggctggatgatcctccagcgcggggatctcatgctggagttcttcgcccaccccaacttgtttattgcagcttataatggttacaaataaagcaatagcatcacaaatttcacaaataaagcatttttttcactgcattctagttgtggtttgtccaaactcatcaatgtatcttatcatgtctgtataccgtcgacctctagctagagcttggcgtaatcatggtcatagctgtttcctgtgtgaaattgttatccgctcacaattccacacaacatacgagccggaagcataaagtgtaaagcctggggtgcctaatgagtgagctaactcacattaattgcgttgcgctcactgcccgctttccagtcgggaaacctgtcgtgccagctgcattaatgaatcggccaacgcgcggggagaggcggtttgcgtattgggcgctcttccgcttcctcgctcactgactcgctgcgctcggtcgttcggctgcggcgagcggtatcagctcactcaaaggcggtaatacggttatccacagaatcaggggataacgcaggaaagaacatgtgagcaaaaggccagcaaaaggccaggaaccgtaaaaaggccgcgttgctggcgtttttccataggctccgcccccctgacgagcatcacaaaaatcgacgctcaagtcagaggtggcgaaacccgacaggactataaagataccaggcgtttccccctggaagctccctcgtgcgctctcctgttccgaccctgccgcttaccggatacctgtccgcctttctcccttcgggaagcgtggcgctttctcatagctcacgctgtaggtatctcagttcggtgtaggtcgttcgctccaagctgggctgtgtgcacgaaccccccgttcagcccgaccgctgcgccttatccggtaactatcgtcttgagtccaacccggtaagacacgacttatcgccactggcagcagccactggtaacaggattagcagagcgaggtatgtaggcggtgctacagagttcttgaagtggtggcctaactacggctacactagaagaacagtatttggtatctgcgctctgctgaagccagttaccttcggaaaaagagttggtagctcttgatccggcaaacaaaccaccgctggtagcggtggtttttttgtttgcaagcagcagattacgcgcagaaaaaaaggatctcaagaagatcctttgatcttttctacggggtctgacgctcagtggaacgaaaactcacgttaagggattttggtcatgagattatcaaaaaggatcttcacctagatccttttaaattaaaaatgaagttttaaatcaatctaaagtatatatgagtaaacttggtctgacagttaccaatgcttaatcagtgaggcacctatctcagcgatctgtctatttcgttcatccatagttgcctgactccccgtcgtgtagataactacgatacgggagggcttaccatctggccccagtgctgcaatgataccgcgagacccacgctcaccggctccagatttatcagcaataaaccagccagccggaagggccgagcgcagaagtggtcctgcaactttatccgcctccatccagtctattaattgttgccgggaagctagagtaagtagttcgccagttaatagtttgcgcaacgttgttgccattgctacaggcatcgtggtgtcacgctcgtcgtttggtatggcttcattcagctccggttcccaacgatcaaggcgagttacatgatcccccatgttgtgcaaaaaagcggttagctccttcggtcctccgatcgttgtcagaagtaagttggccgcagtgttatcactcatggttatggcagcactgcataattctcttactgtcatgccatccgtaagatgcttttctgtgactggtgagtactcaaccaagtcattctgagaatagtgtatgcggcgaccgagttgctcttgcccggcgtcaatacgggataataccgcgccacatagcagaactttaaaagtgctcatcattggaaaacgttcttcggggcgaaaactctcaaggatcttaccgctgttgagatccagttcgatgtaacccactcgtgcacccaactgatcttcagcatcttttactttcaccagcgtttctgggtgagcaaaaacaggaaggcaaaatgccgcaaaaaagggaataagggcgacacggaaatgttgaatactcatactcttcctttttcaatattattgaagcatttatcagggttattgtctcatgagcggatacatatttgaatgtatttagaaaaataaacaaataggggttccgcgcacatttccccgaaaagtgccacctgacgtc

SEQ ID NO: 46 - protein, 1269 aa, synthetic construct
  REGION 1..1269: note = Omicron Spike Hexapro
FVFLVLLPLVSSQCVNLTTRTQLPPAYTNSFTRGVYYPDKVFRSSVLHSTQDLFLPFFSNVTWFHVISGTNGTKRFDNPVLPFNDGVYFASIEKSNIIRGWIFGTTLDSKTQSLLIVNNATNVVIKVCEFQFCNDPFLDHKNNKSWMESEFRVYSSANNCTFEYVSQPFLMDLEGKQGNFKNLREFVFKNIDGYFKIYSKHTPIIVREPEDLPQGFSALEPLVDLPIGINITRFQTLLALHRSYLTPGDSSSGWTAGAAAYYVGYLQPRTFLLKYNENGTITDAVDCALDPLSETKCTLKSFTVEKGIYQTSNFRVQPTESIVRFPNITNLCPFDEVFNATRFASVYAWNRKRISNCVADYSVLYNLAPFFTFKCYGVSPTKLNDLCFTNVYADSFVIRGDEVRQIAPGQTGNIADYNYKLPDDFTGCVIAWNSNKLDSKVSGNYNYLYRLFRKSNLKPFERDISTEIYQAGNKPCNGVAGFNCYFPLRSYSFRPTYGVGHQPYRVVVLSFELLHAPATVCGPKKSTNLVKNKCVNFNFNGLKGTGVLTESNKKFLPFQQFGRDIADTTDAVRDPQTLEILDITPCSFGGVSVITPGTNTSNQVAVLYQGVNCTEVPVAIHADQLTPTWRVYSTGSNVFQTRAGCLIGAEYVNNSYECDIPIGAGICASYQTQTKSHGSASSVASQSIIAYTMSLGAENSVAYSNNSIAIPTNFTISVTTEILPVSMTKTSVDCTMYICGDSTECSNLLLQYGSFCTQLKRALTGIAVEQDKNTQEVFAQVKQIYKTPPIKYFGGFNFSQILPDPSKPSKRSPIEDLLFNKVTLADAGFIKQYGDCLGDIAARDLICAQKFKGLTVLPPLLTDEMIAQYTSALLAGTITSGWTFGAGPALQIPFPMQMAYRFNGIGVTQNVLYENQKLIANQFNSAIGKIQDSLSSTPSALGKLQDVVNHNAQALNTLVKQLSSKFGAISSVLNDIFSRLDPPEAEVQIDRLITGRLQSLQTYVTQQLIRAAEIRASANLAATKMSECVLGQSKRVDFCGKGYHLMSFPQSAPHGVVFLHVTYVPAQEKNFTTAPAICHDGKAHFPREGVFVSNGTHWFVTQRNFYEPQIITTDNTFVSGNCDVVIGIVNNTVYDPLQPELDSFKEELDKYFKNHTSPDVDLGDISGINASVVNIQKEIDRLNEVAKNLNESLIDLQELGKYEQYIKWPWYIWLGFIAGLIAIVMVTIMLCCMTSCCSCLKGCCSCGSCCKFDEDDSEPVLKGVKLHYT

SEQ ID NO: 47 - protein, 1252 aa, synthetic construct
  REGION 1..1252: note = SARS CoV 2 delta spike variantdel 19
MFVFLVLLPLVSSQCVNLRTRTQLPPAYTNSFTRGVYYPDKVFRSSVLHSTQDLFLPFFSNVTWFHAIHVSGTNGTKRFDNPVLPFNDGVYFASTEKSNIIRGWIFGTTLDSKTQSLLIVNNATNVVIKVCEFQFCNDPFLDVYYHKNNKSWMESGVYSSANNCTFEYVSQPFLMDLEGKQGNFKNLREFVFKNIDGYFKIYSKHTPINLVRDLPQGFSALEPLVDLPIGINITRFQTLLALHRSYLTPGDSSSGWTAGAAAYYVGYLQPRTFLLKYNENGTITDAVDCALDPLSETKCTLKSFTVEKGIYQTSNFRVQPTESIVRFPNITNLCPFGEVFNATRFASVYAWNRKRISNCVADYSVLYNSASFSTFKCYGVSPTKLNDLCFTNVYADSFVIRGDEVRQIAPGQTGKIADYNYKLPDDFTGCVIAWNSNNLDSKVGGNYNYRYRLFRKSNLKPFERDISTEIYQAGSKPCNGVEGFNCYFPLQSYGFQPTNGVGYQPYRVVVLSFELLHAPATVCGPKKSTNLVKNKCVNFNFNGLTGTGVLTESNKKFLPFQQFGRDIADTTDAVRDPQTLEILDITPCSFGGVSVITPGTNTSNQVAVLYQGVNCTEVPVAIHADQLTPTWRVYSTGSNVFQTRAGCLIGAEHVNNSYECDIPIGAGICASYQTQTNSRRRARSVASQSIIAYTMSLGAENSVAYSNNSIAIPTNFTISVTTEILPVSMTKTSVDCTMYICGDSTECSNLLLQYGSFCTQLNRALTGIAVEQDKNTQEVFAQVKQIYKTPPIKDFGGFNFSQILPDPSKPSKRSFIEDLLFNKVTLADAGFIKQYGDCLGDIAARDLICAQKFNGLTVLPPLLTDEMIAQYTSALLAGTITSGWTFGAGAALQIPFAMQMAYRFNGIGVTQNVLYENQKLIANQFNSAIGKIQDSLSSTASALGKLQNVVNQNAQALNTLVKQLSSNFGAISSVLNDILSRLDKVEAEVQIDRLITGRLQSLQTYVTQQLIRAAEIRASANLAATKMSECVLGQSKRVDFCGKGYHLMSFPQSAPHGVVFLHVTYVPAQEKNFTTAPAICHDGKAHFPREGVFVSNGTHWFVTQRNFYEPQIITTDNTFVSGNCDVVIGIVNNTVYDPLQPELDSFKEELDKYFKNHTSPDVDLGDISGINASVVNIQKEIDRLNEVAKNLNESLIDLQELGKYEQYIKWPWYIWLGFIAGLIAIVMVTIMLCCMTSCCSCLKGCCSCGSCC

SEQ ID NO: 48 - protein, 1337 aa, synthetic construct
  REGION 1..1337: note = MERS-CoV spike delta C-16
MIHSVFLLMFLLTPTESYVDVGPDSVKSACIEVDIQQTFFDKTWPRPIDVSKADGIIYPQGRTYSNITITYQGLFPYQGDHGDMYVYSAGHATGTTPQKLFVANYSQDVKQFANGFVVRIGAAANSTGTVIISPSTSATIRKIYPAFMLGSSVGNFSDGKMGRFFNHTLVLLPDGCGTLLRAFYCILEPRSGNHCPAGNSYTSFATYHTPATDCSDGNYNRNASLNSFKEYFNLRNCTFMYTYNITEDEILEWFGITQTAQGVHLFSSRYVDLYGGNMFQFATLPVYDTIKYYSIIPHSIRSIQSDRKAWAAFYVYKLQPLTFLLDFSVDGYIRRAIDCGFNDLSQLHCSYESFDVESGVYSVSSFEAKPSGSVVEQAEGVECDFSPLLSGTPPQVYNFKRLVFTNCNYNLTKLLSLFSVNDFTCSQISPAAIASNCYSSLILDYFSYPLSMKSDLSVSSAGPISQFNYKQSFSNPTCLILATVPHNLTTITKPLKYSYINKCSRLLSDDRTEVPQLVNANQYSPCVSIVPSTVWEDGDYYRKQLSPLEGGGWLVASGSTVAMTEQLQMGFGITVQYGTDTNSVCPKLEFANDTKIASQLGNCVEYSLYGVSGRGVFQNCTAVGVRQQRFVYDAYQNLVGYYSDDGNYYCLRACVSVPVSVIYDKETKTHATLFGSVACEHISSTMSQYSRSTRSMLKRRDSTYGPLQTPVGCVLGLVNSSLFVEDCKLPLGQSLCALPDTPSTLTPRSVRSVPGEMRLASIAFNHPIQVDQLNSSYFKLSIPTNFSFGVTQEYIQTTIQKVTVDCKQYVCNGFQKCEQLLREYGQFCSKINQALHGANLRQDDSVRNLFASVKSSQSSPIIPGFGGDFNLTLLEPVSISTGSRSARSAIEDLLFDKVTIADPGYMQGYDDCMQQGPASARDLICAQYVAGYKVLPPLMDVNMEAAYTSSLLGSIAGVGWTAGLSSFAAIPFAQSIFYRLNGVGITQQVLSENQKLIANKFNQALGAMQTGFTTTNEAFQKVQDAVNNNAQALSKLASELSNTFGAISASIGDIIQRLDVLEQDAQIDRLINGRLTTLNAFVAQQLVRSESAALSAQLAKDKVNECVKAQSKRSGFCGQGTHIVSFVVNAPNGLYFMHVGYYPSNHIEVVSAYGLCDAANPTNCIAPVNGYFIKTNNTRIVDEWSYTGSSFYAPEPITSLNTKYVAPQVTYQNISTNLPPPLLGNSTGIDFQDELDEFFKNVSTSIPNFGSLTQINTTLLDLTYEMLSLQQVVKALNESYIDLKELGNYTYYNKWPWYIWLGFIAGLVALALCVFFILCCTGCGTNCMGKLKCNRCC

SEQ ID NO: 49 - protein, 1236 aa, synthetic construct
  REGION 1..1236: note = SARS-CoV Spike delta C-19
MFIFLLFLTLTSGSDLDRCTTFDDVQAPNYTQHTSSMRGVYYPDEIFRSDTLYLTQDLFLPFYSNVTGFHTINHTFDNPVIPFKDGIYFAATEKSNVVRGWVFGSTMNNKSQSVIIINNSTNVVIRACNFELCDNPFFAVSKPMGTQTHTMIFDNAFNCTFEYISDAFSLDVSEKSGNFKHLREFVFKNKDGFLYVYKGYQPIDVVRDLPSGFNTLKPIFKLPLGINITNFRAILTAFSPAQDTWGTSAAAYFVGYLKPTTFMLKYDENGTITDAVDCSQNPLAELKCSVKSFEIDKGIYQTSNFRVVPSGDVVRFPNITNLCPFGEVFNATKFPSVYAWERKKISNCVADYSVLYNSTFFSTFKCYGVSATKLNDLCFSNVYADSFVVKGDDVRQIAPGQTGVIADYNYKLPDDFMGCVLAWNTRNIDATSTGNYNYKYRYLRHGKLRPFERDISNVPFSPDGKPCTPPALNCYWPLNDYGFYTTTGIGYQPYRVVVLSFELLNAPATVCGPKLSTDLIKNQCVNFNFNGLTGTGVLTPSSKRFQPFQQFGRDVSDFTDSVRDPKTSEILDISPCSFGGVSVITPGTNASSEVAVLYQDVNCTDVSTAIHADQLTPAWRIYSTGNNVFQTQAGCLIGAEHVDTSYECDIPIGAGICASYHTVSLLRSTSQKSIVAYTMSLGADSSIAYSNNTIAIPTNFSISITTEVMPVSMAKTSVDCNMYICGDSTECANLLLQYGSFCTQLNRALSGIAAEQDRNTREVFAQVKQMYKTPTLKYFGGFNFSQILPDPLKPTKRSFIEDLLFNKVTLADAGFMKQYGECLGDINARDLICAQKFNGLTVLPPLLTDDMIAAYTAALVSGTATAGWTFGAGAALQIPFAMQMAYRFNGIGVTQNVLYENQKQIANQFNKAISQIQESLTTTSTALGKLQDVVNQNAQALNTLVKQLSSNFGAISSVLNDILSRLDKVEAEVQIDRLITGRLQSLQTYVTQQLIRAAEIRASANLAATKMSECVLGQSKRVDFCGKGYHLMSFPQAAPHGVVFLHVTYVPSQERNFTTAPAICHEGKAYFPREGVFVFNGTSWFITQRNFFSPQIITTDNTFVSGNCDVVIGIINNTVYDPLQPELDSFKEELDKYFKNHTSPDVDLGDISGINASVVNIQKEIDRLNEVAKNLNESLIDLQELGKYEQYIKWPWYVWLGFIAGLIAIVMVTILLCCMTSCCSCLKGACSCGSCC

SEQ ID NO: 50 - protein, 1271 aa, synthetic construct; identical to SEQ ID NO: 7
  REGION 1..1271: note = SARS-CoV-2 spike Hexapro

SEQ ID NO: 51 - protein, 875 aa, synthetic construct
  REGION 1..875: note = MERS-CoV spike Hexapro
MIHSVFLLMFLLTPTESYVDVGPDSVKSACIEVDIQQTFFDKTWPRPIDVSKADGIIYPQGRTYSNITITYQGLFPYQGDHGDMYVYSAGHATGTTPQKLFVANYSQDVKQFANGFVVRIGAAANSTGTVIISPSTSATIRKIYPAFMLGSSVGNFSDGKMGRFFNHTLVLLPDGCGTLLRAFYCILEPRSGNHCPAGNSYTSFATYHTPATDCSDGNYNRNASLNSFKEYFNLRNCTFMYTYNITEDEILEWFGITQTAQGVHLFSSRYVDLYGGNMFQFATLPVYDTIKYYSIIPHSIRSIQSDRKAWAAFYVYKLQPLTFLLDFSVDGYIRRAIDCGFNDLSQLHCSYESFDVESGVYSVSSFEAKPSGSVVEQAEGVECDFSPLLSGTPPQVYNFKRLVFTNCNYNLTKLLSLFSVNDFTCSQISPAAIASNCYSSLILDYFSYPLSMKSDLSVSSAGPISQFNYKQSFSNPTCLILATVPHNLTTITKPLKYSYINKCSRLLSDDRTEVPQLVNANQYSPCVSIVPSTVWEDGDYYRKQLSPLEGGGWLVASGSTVAMTEQLQMGFGITVQYGTDTNSVCPKLEFANDTKIASQLGNCVEYSLYGVSGRGVFQNCTAVGVRQQRFVYDAYQNLVGYYSDDGNYYCLRACVSVPVSVIYDKETKTHATLFGSVACEHISSTMSQYSRSTRSMLKRRDSTYGPLQTPVGCVLGLVNSSLFVEDCKLPLGQSLCALPDTPSTLTPRSVRSVPGEMRLASIAFNHPIQVDQLNSSYFKLSIPTNFSFGVTQEYIQTTIQKVTVDCKQYVCNGFQKCEQLLREYGQFCSKINQALHGANLRQDDSVRNLFASVKSSQSSPIIPGFGGDFNLTLLE

SEQ ID NO: 52 - protein, 1255 aa, synthetic construct; identical to SEQ ID NO: 9
  REGION 1..1255: note = SARS-CoV Spike Hexapro

SEQ ID NO: 53 - protein, 1273 aa, synthetic construct
  REGION 1..1273: note = SARS-CoV-2 Spike Hexapro
MFVFLVLLPLVSSQCVNLTTRTQLPPAYTNSFTRGVYYPDKVFRSSVLHSTQDLFLPFFSNVTWFHAIHVSGTNGTKRFDNPVLPFNDGVYFASTEKSNIIRGWIFGTTLDSKTQSLLIVNNATNVVIKVCEFQFCNDPFLGVYYHKNNKSWMESEFRVYSSANNCTFEYVSQPFLMDLEGKQGNFKNLREFVFKNIDGYFKIYSKHTPINLVRDLPQGFSALEPLVDLPIGINITRFQTLLALHRSYLTPGDSSSGWTAGAAAYYVGYLQPRTFLLKYNENGTITDAVDCALDPLSETKCTLKSFTVEKGIYQTSNFRVQPTESIVRFPNITNLCPFGEVFNATRFASVYAWNRKRISNCVADYSVLYNSASFSTFKCYGVSPTKLNDLCFTNVYADSFVIRGDEVRQIAPGQTGKIADYNYKLPDDFTGCVIAWNSNNLDSKVGGNYNYLYRLFRKSNLKPFERDISTEIYQAGSTPCNGVEGFNCYFPLQSYGFQPTNGVGYQPYRVVVLSFELLHAPATVCGPKKSTNLVKNKCVNFNFNGLTGTGVLTESNKKFLPFQQFGRDIADTTDAVRDPQTLEILDITPCSFGGVSVITPGTNTSNQVAVLYQDVNCTEVPVAIHADQLTPTWRVYSTGSNVFQTRAGCLIGAEHVNNSYECDIPIGAGICASYQTQTNSPGSASSVASQSIIAYTMSLGAENSVAYSNNSIAIPTNFTISVTTEILPVSMTKTSVDCTMYICGDSTECSNLLLQYGSFCTQLNRALTGIAVEQDKNTQEVFAQVKQIYKTPPIKDFGGFNFSQILPDPSKPSKRSPIEDLLFNKVTLADAGFIKQYGDCLGDIAARDLICAQKFNGLTVLPPLLTDEMIAQYTSALLAGTITSGWTFGAGPALQIPFPMQMAYRFNGIGVTQNVLYENQKLIANQFNSAIGKIQDSLSSTPSALGKLQDVVNQNAQALNTLVKQLSSNFGAISSVLNDILSRLDPPEAEVQIDRLITGRLQSLQTYVTQQLIRAAEIRASANLAATKMSECVLGQSKRVDFCGKGYHLMSFPQSAPHGVVFLHVTYVPAQEKNFTTAPAICHDGKAHFPREGVFVSNGTHWFVTQRNFYEPQIITTDNTFVSGNCDVVIGIVNNTVYDPLQPELDSFKEELDKYFKNHTSPDVDLGDISGINASVVNIQKEIDRLNEVAKNLNESLIDLQELGKYEQYIKWPWYIWLGFIAGLIAIVMVTIMLCCMTSCCSCLKGCCSCGSCCKFDEDDSEPVLKGVKLHYT

SEQ ID NO: 54 - protein, 1254 aa, synthetic construct
  REGION 1..1254: note = SARS-CoV-2 Spike del19
MFVFLVLLPLVSSQCVNLTTRTQLPPAYTNSFTRGVYYPDKVFRSSVLHSTQDLFLPFFSNVTWFHAIHVSGTNGTKRFDNPVLPFNDGVYFASTEKSNIIRGWIFGTTLDSKTQSLLIVNNATNVVIKVCEFQFCNDPFLGVYYHKNNKSWMESEFRVYSSANNCTFEYVSQPFLMDLEGKQGNFKNLREFVFKNIDGYFKIYSKHTPINLVRDLPQGFSALEPLVDLPIGINITRFQTLLALHRSYLTPGDSSSGWTAGAAAYYVGYLQPRTFLLKYNENGTITDAVDCALDPLSETKCTLKSFTVEKGIYQTSNFRVQPTESIVRFPNITNLCPFGEVFNATRFASVYAWNRKRISNCVADYSVLYNSASFSTFKCYGVSPTKLNDLCFTNVYADSFVIRGDEVRQIAPGQTGKIADYNYKLPDDFTGCVIAWNSNNLDSKVGGNYNYLYRLFRKSNLKPFERDISTEIYQAGSTPCNGVEGFNCYFPLQSYGFQPTNGVGYQPYRVVVLSFELLHAPATVCGPKKSTNLVKNKCVNFNFNGLTGTGVLTESNKKFLPFQQFGRDIADTTDAVRDPQTLEILDITPCSFGGVSVITPGTNTSNQVAVLYQDVNCTEVPVAIHADQLTPTWRVYSTGSNVFQTRAGCLIGAEHVNNSYECDIPIGAGICASYQTQTNSPRRARSVASQSIIAYTMSLGAENSVAYSNNSIAIPTNFTISVTTEILPVSMTKTSVDCTMYICGDSTECSNLLLQYGSFCTQLNRALTGIAVEQDKNTQEVFAQVKQIYKTPPIKDFGGFNFSQILPDPSKPSKRSFIEDLLFNKVTLADAGFIKQYGDCLGDIAARDLICAQKFNGLTVLPPLLTDEMIAQYTSALLAGTITSGWTFGAGAALQIPFAMQMAYRFNGIGVTQNVLYENQKLIANQFNSAIGKIQDSLSSTASALGKLQDVVNQNAQALNTLVKQLSSNFGAISSVLNDILSRLDKVEAEVQIDRLITGRLQSLQTYVTQQLIRAAEIRASANLAATKMSECVLGQSKRVDFCGKGYHLMSFPQSAPHGVVFLHVTYVPAQEKNFTTAPAICHDGKAHFPREGVFVSNGTHWFVTQRNFYEPQIITTDNTFVSGNCDVVIGIVNNTVYDPLQPELDSFKEELDKYFKNHTSPDVDLGDISGINASVVNIQKEIDRLNEVAKNLNESLIDLQELGKYEQYIKWPWYIWLGFIAGLIAIVMVTIMLCCMTSCCSCLKGCCSCGSCC

SEQ ID NO: 55 - DNA, 9490 bp, synthetic construct
  misc_feature 1..9490: note = pZF46 Omicron Spike Hexapro
  source 1..9490: mol_type = other DNA
gacggatcgggagatctcccgatcccctatggtgcactctcagtacaatctgctctgatgccgcatagttaagccagtatctgctccctgcttgtgtgttggaggtcgctgagtagtgcgcgagcaaaatttaagctacaacaaggcaaggcttgaccgacaattgcatgaagaatctgcttagggttaggcgttttgcgctgcttcgcgatgtacgggccagatatacgcgttgacattgattattgactagttattaatagtaatcaattacggggtcattagttcatagcccatatatggagttccgcgttacataacttacggtaaatggcccgcctggctgaccgcccaacgacccccgcccattgacgtcaataatgacgtatgttcccatagtaacgccaatagggactttccattgacgtcaatgggtggagtatttacggtaaactgcccacttggcagtacatcaagtgtatcatatgccaagtacgccccctattgacgtcaatgacggtaaatggcccgcctggcattatgcccagtacatgaccttatgggactttcctacttggcagtacatctacgtattagtcatcgctattaccatggtgatgcggttttggcagtacatcaatgggcgtggatagcggtttgactcacggggatttccaagtctccaccccattgacgtcaatgggagtttgttttggcaccaaaatcaacgggactttccaaaatgtcgtaacaactccgccccattgacgcaaatgggcggtaggcgtgtacggtgggaggtctatataagcagagctctctggctaactagagaacccactgcttactggcttatcgaaattaatacgactcactatagggagacccaagctggctagccaccgagaataaactagtattcttctggtccccacagactcagagagaacccgccaccatgtttgtgttcctggtgctgctgccactggtgtccagccagtgtgtgaacctgaccaccaggacccaacttcctcctgcctacaccaactccttcaccaggggagtctactaccctgacaaggtgttcaggtcctctgtgctgcacagcacccaggacctgttcctgccattcttcagcaatgtgacctggttccatgtgatctctggcaccaatggcaccaagaggtttgacaaccctgtgctgccattcaatgatggagtctactttgccagcatcgagaagagcaacatcatcaggggctggatttttggcaccaccctggacagcaagacccagtccctgctgattgtgaacaatgccaccaatgtggtgattaaggtgtgtgagttccagttctgtaatgacccattcctggaccacaagaacaacaagtcctggatggagtctgagttcagggtctactcctctgccaacaactgtacctttgaatatgtgagccaaccattcctgatggacttggagggcaagcagggcaacttcaagaacctgagggagtttgtgttcaagaacattgatggctacttcaagatttacagcaaacacacaccaatcatcgtgagggagcccgaggacctgccacagggcttctctgccttggaaccactggtggacctgccaattggcatcaacatcaccaggttccagaccctgctggctctgcacaggtcctacctgacacctggagactcctcctctggctggacagcaggagcagcagcctactatgtgggctacctccaaccaaggaccttcctgctgaaatacaatgagaatggcaccatcacagatgctgtggactgtgccctggacccactgtctgagaccaagtgtaccctgaaatccttcacagtggagaagggcatctaccagaccagcaacttcagggtccaaccaacagagagcattgtgaggtttccaaacatcaccaacctgtgtccatttgacgaggtgttcaacgccaccaggtttgcctctgtctatgcctggaacaggaagaggattagcaactgtgtggctgactactctgtgctctacaacctggcccccttcttcaccttcaagtgttatggagtgagcccaaccaaactgaatgacctgtgtttcaccaatgtctatgctgactcctttgtgattaggggagatgaggtgagacagattgcccctggacaaacaggcaacattgctgactacaactacaaactgcctgatgacttcacaggctgtgtgattgcctggaacagcaacaagctggacagcaaggtgagcggcaactacaactacctctacagactgttcaggaagagcaacctgaaaccatttgagagggacatcagcacagagatttaccaggctggcaacaagccatgtaatggagtggccggcttcaactgttactttccactccggtcctatagcttccggccaacctacggagtgggccaccaaccatacagggtggtggtgctgtcctttgaactgctccatgcccctgccacagtgtgtggaccaaagaagagcaccaacctggtgaagaacaagtgtgtgaacttcaacttcaatggactgaagggcacaggagtgctgacagagagcaacaagaagttcctgccattccaacagtttggcagggacattgctgacaccacagatgctgtgagggacccacagaccttggagattctggacatcacaccatgttcctttggaggagtgtctgtgattacacctggcaccaacaccagcaaccaggtggctgtgctctaccagggcgtgaactgtactgaggtgcctgtggctatccatgctgaccaacttacaccaacctggagggtctacagcacaggcagcaatgtgttccagaccagggctggctgtctgattggagcagagtacgtgaacaactcctatgagtgtgacatcccaattggagcaggcatctgtgcctcctaccagacccagaccaagagccacggctctgcatcttctgtggcaagccagagcatcattgcctacacaatgagtctgggagcagagaactctgtggcttacagcaacaacagcattgccatcccaaccaacttcaccatctctgtgaccacagagattctgcctgtgagtatgaccaagacctctgtggactgtacaatgtatatctgtggagacagcacagagtgtagcaacctgctgctccaatatggctccttctgtacccaacttaagagggctctgacaggcattgctgtggaacaggacaagaacacccaggaggtgtttgcccaggtgaagcagatttacaagacacctccaatcaagtactttggaggcttcaacttcagccagattctgcctgacccaagcaagccaagcaagaggtcccctattgaggacctgctgttcaacaaggtgaccctggctgatgctggcttcatcaagcaatatggagactgtctgggagacattgctgccagggacctgatttgtgcccagaagttcaagggactgacagtgctgcctccactgctgacagatgagatgattgcccaatacacctctgccctgctggctggcaccatcacctctggctggacctttggagcaggaccagccctccaaatcccatttccaatgcagatggcttacaggttcaatggcattggagtgacccagaatgtgctctatgagaaccagaaactgattgccaaccagttcaactctgccattggcaagattcaggactccctgtccagcacaccatctgccctgggcaaactccaagatgtggtgaaccacaatgcccaggctctgaacaccctggtgaagcaactttccagcaagtttggagccatctcctctgtgctgaatgacatcttcagcagactggacccaccagaggctgaggtccagattgacagactgattacaggcagactccaatccctccaaacctatgtgacccaacaacttatcagggctgctgagattagggcatctgccaacctggctgccaccaagatgagtgagtgtgtgctgggacaaagcaagagggtggacttctgtggcaagggctaccacctgatgagttttccacagtctgcccctcatggagtggtgttcctgcatgtgacctatgtgcctgcccaggagaagaacttcaccacagcccctgccatctgccatgatggcaaggctcactttccaagggagggagtgtttgtgagcaatggcacccactggtttgtgacccagaggaacttctatgaaccacagattatcaccacagacaacacctttgtgtctggcaactgtgatgtggtgattggcattgtgaacaacacagtctatgacccactccaacctgaactggactccttcaaggaggaactggacaaatacttcaagaaccacaccagccctgatgtggacctgggagacatctctggcatcaatgcctctgtggtgaacatccagaaggagattgacagactgaatgaggtggctaagaacctgaatgagtccctgattgacctccaagaactgggcaaatatgaacaatacatcaagtggccatggtacatctggctgggcttcattgctggactgattgccattgtgatggtgaccataatgctgtgttgtatgacctcctgttgttcctgtctgaaaggctgttgttcctgtggctcctgttgtaagtttgatgaggatgactctgaacctgtgctgaaaggagtgaaactgcactacacctgactcgagctggtactgcatgcacgcaatgctagctgcccctttcccgtcctgggtaccccgagtctcccccgacctcgggtcccaggtatgctcccacctccacctgccccactcaccacctctgctagttccagacacctcccaagcacgcagcaatgcagctcaaaacgcttagcctagccacacccccacgggaaacagcagtgattaacctttagcaataaacgaaagtttaactaagctatactaaccccagggttggtcaatttcgtgccagccacaccctggagctagcaaaccgctgatcagcctcgactgtgccttctagttgccagccatctgttgtttgcccctcccccgtgccttccttgaccctggaaggtgccactcccactgtcctttcctaataaaatgaggaaattgcatcgcattgtctgagtaggtgtcattctattctggggggtggggtggggcaggacagcaagggggaggattgggaagacaatagcaggcatgctggggatgcggtgggctctatggcttctgaggcggaaagaaccagctggggctctagggggtatccccacgcgccctgtagcggcgcattaagcgcggcgggtgtggtggttacgcgcagcgtgaccgctacacttgccagcgccctagcgcccgctcctttcgctttcttcccttcctttctcgccacgttcgccggctttccccgtcaagctctaaatcgggggctccctttagggttccgatttagtgctttacggcacctcgaccccaaaaaacttgattagggtgatggttcacgtagtgggccatcgccctgatagacggtttttcgccctttgacgttggagtccacgttctttaatagtggactcttgttccaaactggaacaacactcaaccctatctcggtctattcttttgatttataagggattttgccgatttcggcctattggttaaaaaatgagctgatttaacaaaaatttaacgcgaattaattctgtggaatgtgtgtcagttagggtgtggaaagtccccaggctccccagcaggcagaagtatgcaaagcatgcatctcaattagtcagcaaccaggtgtggaaagtccccaggctccccagcaggcagaagtatgcaaagcatgcatctcaattagtcagcaaccatagtcccgcccctaactccgcccatcccgcccctaactccgcccagttccgcccattctccgccccatggctgactaattttttttatttatgcagaggccgaggccgcctctgcctctgagctattccagaagtagtgaggaggcttttttggaggcctaggcttttgcaaaaagctcccgggagcttgtatatccattttcggatctgatcaagagacaggatgaggatcgtttcgcatgattgaacaagatggattgcacgcaggttctccggccgcttgggtggagaggctattcggctatgactgggcacaacagacaatcggctgctctgatgccgccgtgttccggctgtcagcgcaggggcgcccggttctttttgtcaagaccgacctgtccggtgccctgaatgaactgcaggacgaggcagcgcggctatcgtggctggccacgacgggcgttccttgcgcagctgtgctcgacgttgtcactgaagcgggaagggactggctgctattgggcgaagtgccggggcaggatctcctgtcatctcaccttgctcctgccgagaaagtatccatcatggctgatgcaatgcggcggctgcatacgcttgatccggctacctgcccattcgaccaccaagcgaaacatcgcatcgagcgagcacgtactcggatggaagccggtcttgtcgatcaggatgatctggacgaagagcatcaggggctcgcgccagccgaactgttcgccaggctcaaggcgcgcatgcccgacggcgaggatctcgtcgtgacccatggcgatgcctgcttgccgaatatcatggtggaaaatggccgcttttctggattcatcgactgtggccggctgggtgtggcggaccgctatcaggacatagcgttggctacccgtgatattgctgaagagcttggcggcgaatgggctgaccgcttcctcgtgctttacggtatcgccgctcccgattcgcagcgcatcgccttctatcgccttcttgacgagttcttctgagcgggactctggggttcgaaatgaccgaccaagcgacgcccaacctgccatcacgagatttcgattccaccgccgccttctatgaaaggttgggcttcggaatcgttttccgggacgccggctggatgatcctccagcgcggggatctcatgctggagttcttcgcccaccccaacttgtttattgcagcttataatggttacaaataaagcaatagcatcacaaatttcacaaataaagcatttttttcactgcattctagttgtggtttgtccaaactcatcaatgtatcttatcatgtctgtataccgtcgacctctagctagagcttggcgtaatcatggtcatagctgtttcctgtgtgaaattgttatccgctcacaattccacacaacatacgagccggaagcataaagtgtaaagcctggggtgcctaatgagtgagctaactcacattaattgcgttgcgctcactgcccgctttccagtcgggaaacctgtcgtgccagctgcattaatgaatcggccaacgcgcggggagaggcggtttgcgtattgggcgctcttccgcttcctcgctcactgactcgctgcgctcggtcgttcggctgcggcgagcggtatcagctcactcaaaggcggtaatacggttatccacagaatcaggggataacgcaggaaagaacatgtgagcaaaaggccagcaaaaggccaggaaccgtaaaaaggccgcgttgctggcgtttttccataggctccgcccccctgacgagcatcacaaaaatcgacgctcaagtcagaggtggcgaaacccgacaggactataaagataccaggcgtttccccctggaagctccctcgtgcgctctcctgttccgaccctgccgcttaccggatacctgtccgcctttctcccttcgggaagcgtggcgctttctcatagctcacgctgtaggtatctcagttcggtgtaggtcgttcgctccaagctgggctgtgtgcacgaaccccccgttcagcccgaccgctgcgccttatccggtaactatcgtcttgagtccaacccggtaagacacgacttatcgccactggcagcagccactggtaacaggattagcagagcgaggtatgtaggcggtgctacagagttcttgaagtggtggcctaactacggctacactagaagaacagtatttggtatctgcgctctgctgaagccagttaccttcggaaaaagagttggtagctcttgatccggcaaacaaaccaccgctggtagcggtggtttttttgtttgcaagcagcagattacgcgcagaaaaaaaggatctcaagaagatcctttgatcttttctacggggtctgacgctcagtggaacgaaaactcacgttaagggattttggtcatgagattatcaaaaaggatcttcacctagatccttttaaattaaaaatgaagttttaaatcaatctaaagtatatatgagtaaacttggtctgacagttaccaatgcttaatcagtgaggcacctatctcagcgatctgtctatttcgttcatccatagttgcctgactccccgtcgtgtagataactacgatacgggagggcttaccatctggccccagtgctgcaatgataccgcgagacccacgctcaccggctccagatttatcagcaataaaccagccagccggaagggccgagcgcagaagtggtcctgcaactttatccgcctccatccagtctattaattgttgccgggaagctagagtaagtagttcgccagttaatagtttgcgcaacgttgttgccattgctacaggcatcgtggtgtcacgctcgtcgtttggtatggcttcattcagctccggttcccaacgatcaaggcgagttacatgatcccccatgttgtgcaaaaaagcggttagctccttcggtcctccgatcgttgtcagaagtaagttggccgcagtgttatcactcatggttatggcagcactgcataattctcttactgtcatgccatccgtaagatgcttttctgtgactggtgagtactcaaccaagtcattctgagaatagtgtatgcggcgaccgagttgctcttgcccggcgtcaatacgggataataccgcgccacatagcagaactttaaaagtgctcatcattggaaaacgttcttcggggcgaaaactctcaaggatcttaccgctgttgagatccagttcgatgtaacccactcgtgcacccaactgatcttcagcatcttttactttcaccagcgtttctgggtgagcaaaaacaggaaggcaaaatgccgcaaaaaagggaataagggcgacacggaaatgttgaatactcatactcttcctttttcaatattattgaagcatttatcagggttattgtctcatgagcggatacatatttgaatgtatttagaaaaataaacaaataggggttccgcgcacatttccccgaaaagtgccacctgacgtc

SEQ ID NO: 56 - DNA, 9114 bp, synthetic construct
  misc_feature 1..9114: note = pZF47 Omicron Spike Pseudovirus Del19
  source 1..9114: mol_type = other DNA
gacggatcgggagatctcccgatcccctatggtgcactctcagtacaatctgctctgatgccgcatagttaagccagtatctgctccctgcttgtgtgttggaggtcgctgagtagtgcgcgagcaaaatttaagctacaacaaggcaaggcttgaccgacaattgcatgaagaatctgcttagggttaggcgttttgcgctgcttcgcgatgtacgggccagatatacgcgttgacattgattattgactagttattaatagtaatcaattacggggtcattagttcatagcccatatatggagttccgcgttacataacttacggtaaatggcccgcctggctgaccgcccaacgacccccgcccattgacgtcaataatgacgtatgttcccatagtaacgccaatagggactttccattgacgtcaatgggtggagtatttacggtaaactgcccacttggcagtacatcaagtgtatcatatgccaagtacgccccctattgacgtcaatgacggtaaatggcccgcctggcattatgcccagtacatgaccttatgggactttcctacttggcagtacatctacgtattagtcatcgctattaccatggtgatgcggttttggcagtacatcaatgggcgtggatagcggtttgactcacggggatttccaagtctccaccccattgacgtcaatgggagtttgttttggcaccaaaatcaacgggactttccaaaatgtcgtaacaactccgccccattgacgcaaatgggcggtaggcgtgtacggtgggaggtctatataagcagagctctctggctaactagagaacccactgcttactggcttatcgaaattaatacgactcactatagggagacccaagctggctagccaccatgtttgtgttcctggtgctgctgccactggtgtccagccagtgtgtgaacctgaccaccaggacccaacttcctcctgcctacaccaactccttcaccaggggagtctactaccctgacaaggtgttcaggtcctctgtgctgcacagcacccaggacctgttcctgccattcttcagcaatgtgacctggttccatgtgatctctggcaccaatggcaccaagaggtttgacaaccctgtgctgccattcaatgatggagtctactttgccagcatcgagaagagcaacatcatcaggggctggatttttggcaccaccctggacagcaagacccagtccctgctgattgtgaacaatgccaccaatgtggtgattaaggtgtgtgagttccagttctgtaatgacccattcctggaccacaagaacaacaagtcctggatggagtctgagttcagggtctactcctctgccaacaactgtacctttgaatatgtgagccaaccattcctgatggacttggagggcaagcagggcaacttcaagaacctgagggagtttgtgttcaagaacattgatggctacttcaagatttacagcaaacacacaccaatcatcgtgagggagcccgaggacctgccacagggcttctctgccttggaaccactggtggacctgccaattggcatcaacatcaccaggttccagaccctgctggctctgcacaggtcctacctgacacctggagactcctcctctggctggacagcaggagcagcagcctactatgtgggctacctccaaccaaggaccttcctgctgaaatacaatgagaatggcaccatcacagatgctgtggactgtgccctggacccactgtctgagaccaagtgtaccctgaaatccttcacagtggagaagggcatctaccagaccagcaacttcagggtccaaccaacagagagcattgtgaggtttccaaacatcaccaacctgtgtccatttgacgaggtgttcaacgccaccaggtttgcctctgtctatgcctggaacaggaagaggattagcaactgtgtggctgactactctgtgctctacaacctggcccccttcttcaccttcaagtgttatggagtgagcccaaccaaactgaatgacctgtgtttcaccaatgtctatgctgactcctttgtgattaggggagatgaggtgagacagattgcccctggacaaacaggcaacattgctgactacaactacaaactgcctgatgacttcacaggctgtgtgattgcctggaacagcaacaagctggacagcaaggtgagcggcaactacaactacctctacagactgttcaggaagagcaacctgaaaccatttgagagggacatcagcacagagatttaccaggctggcaacaagccatgtaatggagtggccggcttcaactgttactttccactccggtcctatagcttccggccaacctacggagtgggccaccaaccatacagggtggtggtgctgtcctttgaactgctccatgcccctgccacagtgtgtggaccaaagaagagcaccaacctggtgaagaacaagtgtgtgaacttcaacttcaatggactgaagggcacaggagtgctgacagagagcaacaagaagttcctgccattccaacagtttggcagggacattgctgacaccacagatgctgtgagggacccacagaccttggagattctggacatcacaccatgttcctttggaggagtgtctgtgattacacctggcaccaacaccagcaaccaggtggctgtgctctaccagggcgtgaactgtactgaggtgcctgtggctatccatgctgaccaacttacaccaacctggagggtctacagcacaggcagcaatgtgttccagaccagggctggctgtctgattggagcagagtacgtgaacaactcctatgagtgtgacatcccaattggagcaggcatctgtgcctcctaccagacccagaccaagagccacaggagggcaaggtctgtggcaagccagagcatcattgcctacacaatgagtctgggagcagagaactctgtggcttacagcaacaacagcattgccatcccaaccaacttcaccatctctgtgaccacagagattctgcctgtgagtatgaccaagacctctgtggactgtacaatgtatatctgtggagacagcacagagtgtagcaacctgctgctccaatatggctccttctgtacccaacttaagagggctctgacaggcattgctgtggaacaggacaagaacacccaggaggtgtttgcccaggtgaagcagatttacaagacacctccaatcaagtactttggaggcttcaacttcagccagattctgcctgacccaagcaagccaagcaagaggtccttcattgaggacctgctgttcaacaaggtgaccctggctgatgctggcttcatcaagcaatatggagactgtctgggagacattgctgccagggacctgatttgtgcccagaagttcaagggactgacagtgctgcctccactgctgacagatgagatgattgcccaatacacctctgccctgctggctggcaccatcacctctggctggacctttggagcaggagcagccctccaaatcccatttgctatgcagatggcttacaggttcaatggcattggagtgacccagaatgtgctctatgagaaccagaaactgattgccaaccagttcaactctgccattggcaagattcaggactccctgtccagcacagcctctgccctgggcaaactccaagatgtggtgaaccacaatgcccaggctctgaacaccctggtgaagcaactttccagcaagtttggagccatctcctctgtgctgaatgacatcttcagcagactggacaaggtggaggctgaggtccagattgacagactgattacaggcagactccaatccctccaaacctatgtgacccaacaacttatcagggctgctgagattagggcatctgccaacctggctgccaccaagatgagtgagtgtgtgctgggacaaagcaagagggtggacttctgtggcaagggctaccacctgatgagttttccacagtctgcccctcatggagtggtgttcctgcatgtgacctatgtgcctgcccaggagaagaacttcaccacagcccctgccatctgccatgatggcaaggctcactttccaagggagggagtgtttgtgagcaatggcacccactggtttgtgacccagaggaacttctatgaaccacagattatcaccacagacaacacctttgtgtctggcaactgtgatgtggtgattggcattgtgaacaacacagtctatgacccactccaacctgaactggactccttcaaggaggaactggacaaatacttcaagaaccacaccagccctgatgtggacctgggagacatctctggcatcaatgcctctgtggtgaacatccagaaggagattgacagactgaatgaggtggctaagaacctgaatgagtccctgattgacctccaagaactgggcaaatatgaacaatacatcaagtggccatggtacatctggctgggcttcattgctggactgattgccattgtgatggtgaccataatgctgtgttgtatgacctcctgttgttcctgtctgaaaggctgttgttcctgtggctcctgttgttgaggatccgagctcggtaccaagcttaagtttaaaccgctgatcagcctcgactgtgccttctagttgccagccatctgttgtttgcccctcccccgtgccttccttgaccctggaaggtgccactcccactgtcctttcctaataaaatgaggaaattgcatcgcattgtctgagtaggtgtcattctattctggggggtggggtggggcaggacagcaagggggaggattgggaagacaatagcaggcatgctggggatgcggtgggctctatggcttctgaggcggaaagaaccagctggggctctagggggtatccccacgcgccctgtagcggcgcattaagcgcggcgggtgtggtggttacgcgcagcgtgaccgctacacttgccagcgccctagcgcccgctcctttcgctttcttcccttcctttctcgccacgttcgccggctttccccgtcaagctctaaatcgggggctccctttagggttccgatttagtgctttacggcacctcgaccccaaaaaacttgattagggtgatggttcacgtagtgggccatcgccctgatagacggtttttcgccctttgacgttggagtccacgttctttaatagtggactcttgttccaaactggaacaacactcaaccctatctcggtctattcttttgatttataagggattttgccgatttcggcctattggttaaaaaatgagctgatttaacaaaaatttaacgcgaattaattctgtggaatgtgtgtcagttagggtgtggaaagtccccaggctccccagcaggcagaagtatgcaaagcatgcatctcaattagtcagcaaccaggtgtggaaagtccccaggctccccagcaggcagaagtatgcaaagcatgcatctcaattagtcagcaaccatagtcccgcccctaactccgcccatcccgcccctaactccgcccagttccgcccattctccgccccatggctgactaattttttttatttatgcagaggccgaggccgcctctgcctctgagctattccagaagtagtgaggaggcttttttggaggcctaggcttttgcaaaaagctcccgggagcttgtatatccattttcggatctgatcaagagacaggatgaggatcgtttcgcatgattgaacaagatggattgcacgcaggttctccggccgcttgggtggagaggctattcggctatgactgggcacaacagacaatcggctgctctgatgccgccgtgttccggctgtcagcgcaggggcgcccggttctttttgtcaagaccgacctgtccggtgccctgaatgaactgcaggacgaggcagcgcggctatcgtggctggccacgacgggcgttccttgcgcagctgtgctcgacgttgtcactgaagcgggaagggactggctgctattgggcgaagtgccggggcaggatctcctgtcatctcaccttgctcctgccgagaaagtatccatcatggctgatgcaatgcggcggctgcatacgcttgatccggctacctgcccattcgaccaccaagcgaaacatcgcatcgagcgagcacgtactcggatggaagccggtcttgtcgatcaggatgatctggacgaagagcatcaggggctcgcgccagccgaactgttcgccaggctcaaggcgcgcatgcccgacggcgaggatctcgtcgtgacccatggcgatgcctgcttgccgaatatcatggtggaaaatggccgcttttctggattcatcgactgtggccggctgggtgtggcggaccgctatcaggacatagcgttggctacccgtgatattgctgaagagcttggcggcgaatgggctgaccgcttcctcgtgctttacggtatcgccgctcccgattcgcagcgcatcgccttctatcgccttcttgacgagttcttctgagcgggactctggggttcgaaatgaccgaccaagcgacgcccaacctgccatcacgagatttcgattccaccgccgccttctatgaaaggttgggcttcggaatcgttttccgggacgccggctggatgatcctccagcgcggggatctcatgctggagttcttcgcccaccccaacttgtttattgcagcttataatggttacaaataaagcaatagcatcacaaatttcacaaataaagcatttttttcactgcattctagttgtggtttgtccaaactcatcaatgtatcttatcatgtctgtataccgtcgacctctagctagagcttggcgtaatcatggtcatagctgtttcctgtgtgaaattgttatccgctcacaattccacacaacatacgagccggaagcataaagtgtaaagcctggggtgcctaatgagtgagctaactcacattaattgcgttgcgctcactgcccgctttccagtcgggaaacctgtcgtgccagctgcattaatgaatcggccaacgcgcggggagaggcggtttgcgtattgggcgctcttccgcttcctcgctcactgactcgctgcgctcggtcgttcggctgcggcgagcggtatcagctcactcaaaggcggtaatacggttatccacagaatcaggggataacgcaggaaagaacatgtgagcaaaaggccagcaaaaggccaggaaccgtaaaaaggccgcgttgctggcgtttttccataggctccgcccccctgacgagcatcacaaaaatcgacgctcaagtcagaggtggcgaaacccgacaggactataaagataccaggcgtttccccctggaagctccctcgtgcgctctcctgttccgaccctgccgcttaccggatacctgtccgcctttctcccttcgggaagcgtggcgctttctcatagctcacgctgtaggtatctcagttcggtgtaggtcgttcgctccaagctgggctgtgtgcacgaaccccccgttcagcccgaccgctgcgccttatccggtaactatcgtcttgagtccaacccggtaagacacgacttatcgccactggcagcagccactggtaacaggattagcagagcgaggtatgtaggcggtgctacagagttcttgaagtggtggcctaactacggctacactagaagaacagtatttggtatctgcgctctgctgaagccagttaccttcggaaaaagagttggtagctcttgatccggcaaacaaaccaccgctggtagcggtggtttttttgtttgcaagcagcagattacgcgcagaaaaaaaggatctcaagaagatcctttgatcttttctacggggtctgacgctcagtggaacgaaaactcacgttaagggattttggtcatgagattatcaaaaaggatcttcacctagatccttttaaattaaaaatgaagttttaaatcaatctaaagtatatatgagtaaacttggtctgacagttaccaatgcttaatcagtgaggcacctatctcagcgatctgtctatttcgttcatccatagttgcctgactccccgtcgtgtagataactacgatacgggagggcttaccatctggccccagtgctgcaatgataccgcgagacccacgctcaccggctccagatttatcagcaataaaccagccagccggaagggccgagcgcagaagtggtcctgcaactttatccgcctccatccagtctattaattgttgccgggaagctagagtaagtagttcgccagttaatagtttgcgcaacgttgttgccattgctacaggcatcgtggtgtcacgctcgtcgtttggtatggcttcattcagctccggttcccaacgatcaaggcgagttacatgatcccccatgttgtgcaaaaaagcggttagctccttcggtcctccgatcgttgtcagaagtaagttggccgcagtgttatcactcatggttatggcagcactgcataattctcttactgtcatgccatccgtaagatgcttttctgtgactggtgagtactcaaccaagtcattctgagaatagtgtatgcggcgaccgagttgctcttgcccggcgtcaatacgggataataccgcgccacatagcagaactttaaaagtgctcatcattggaaaacgttcttcggggcgaaaactctcaaggatcttaccgctgttgagatccagttcgatgtaacccactcgtgcacccaactgatcttcagcatcttttactttcaccagcgtttctgggtgagcaaaaacaggaaggcaaaatgccgcaaaaaagggaataagggcgacacggaaatgttgaatactcatactcttcctttttcaatattattgaagcatttatcagggttattgtctcatgagcggatacatatttgaatgtatttagaaaaataaacaaataggggttccgcgcacatttccccgaaaagtgccacctgacgtc

SEQ ID NO: 57 - protein, 1251 aa, synthetic construct
  REGION 1..1251: note = Omicron Spike Del19
MFVFLVLLPLVSSQCVNLTTRTQLPPAYTNSFTRGVYYPDKVFRSSVLHSTQDLFLPFFSNVTWFHVISGTNGTKRFDNPVLPFNDGVYFASIEKSNIIRGWIFGTTLDSKTQSLLIVNNATNVVIKVCEFQFCNDPFLDHKNNKSWMESEFRVYSSANNCTFEYVSQPFLMDLEGKQGNFKNLREFVFKNIDGYFKIYSKHTPIIVREPEDLPQGFSALEPLVDLPIGINITRFQTLLALHRSYLTPGDSSSGWTAGAAAYYVGYLQPRTFLLKYNENGTITDAVDCALDPLSETKCTLKSFTVEKGIYQTSNFRVQPTESIVRFPNITNLCPFDEVFNATRFASVYAWNRKRISNCVADYSVLYNLAPFFTFKCYGVSPTKLNDLCFTNVYADSFVIRGDEVRQIAPGQTGNIADYNYKLPDDFTGCVIAWNSNKLDSKVSGNYNYLYRLFRKSNLKPFERDISTEIYQAGNKPCNGVAGFNCYFPLRSYSFRPTYGVGHQPYRVVVLSFELLHAPATVCGPKKSTNLVKNKCVNFNFNGLKGTGVLTESNKKFLPFQQFGRDIADTTDAVRDPQTLEILDITPCSFGGVSVITPGTNTSNQVAVLYQGVNCTEVPVAIHADQLTPTWRVYSTGSNVFQTRAGCLIGAEYVNNSYECDIPIGAGICASYQTQTKSHRRARSVASQSIIAYTMSLGAENSVAYSNNSIAIPTNFTISVTTEILPVSMTKTSVDCTMYICGDSTECSNLLLQYGSFCTQLKRALTGIAVEQDKNTQEVFAQVKQIYKTPPIKYFGGFNFSQILPDPSKPSKRSFIEDLLFNKVTLADAGFIKQYGDCLGDIAARDLICAQKFKGLTVLPPLLTDEMIAQYTSALLAGTITSGWTFGAGAALQIPFAMQMAYRFNGIGVTQNVLYENQKLIANQFNSAIGKIQDSLSSTASALGKLQDVVNHNAQALNTLVKQLSSKFGAISSVLNDIFSRLDKVEAEVQIDRLITGRLQSLQTYVTQQLIRAAEIRASANLAATKMSECVLGQSKRVDFCGKGYHLMSFPQSAPHGVVFLHVTYVPAQEKNFTTAPAICHDGKAHFPREGVFVSNGTHWFVTQRNFYEPQIITTDNTFVSGNCDVVIGIVNNTVYDPLQPELDSFKEELDKYFKNHTSPDVDLGDISGINASVVNIQKEIDRLNEVAKNLNESLIDLQELGKYEQYIKWPWYIWLGFIAGLIAIVMVTIMLCCMTSCCSCLKGCCSCGSCC

SEQ ID NO: 58 - protein, 1251 aa, synthetic construct
  REGION 1..1251: note = Omicron BA.2.12.1 Spike Del19
MFVFLVLLPLVSSQCVNLITRTQSYTNSFTRGVYYPDKVFRSSVLHSTQDLFLPFFSNVTWFHAIHVSGTNGTKRFDNPVLPFNDGVYFASTEKSNIIRGWIFGTTLDSKTQSLLIVNNATNVVIKVCEFQFCNDPFLDVYYHKNNKSWMESEFRVYSSANNCTFEYVSQPFLMDLEGKQGNFKNLREFVFKNIDGYFKIYSKHTPINLGRDLPQGFSALEPLVDLPIGINITRFQTLLALHRSYLTPGDSSSGWTAGAAAYYVGYLQPRTFLLKYNENGTITDAVDCALDPLSETKCTLKSFTVEKGIYQTSNFRVQPTESIVRFPNITNLCPFDEVFNATRFASVYAWNRKRISNCVADYSVLYNFAPFFAFKCYGVSPTKLNDLCFTNVYADSFVIRGNEVSQIAPGQTGNIADYNYKLPDDFTGCVIAWNSNKLDSKVGGNYNYQYRLFRKSNLKPFERDISTEIYQAGNKPCNGVAGFNCYFPLRSYGFRPTYGVGHQPYRVVVLSFELLHAPATVCGPKKSTNLVKNKCVNFNFNGLTGTGVLTESNKKFLPFQQFGRDIADTTDAVRDPQTLEILDITPCSFGGVSVITPGTNTSNQVAVLYQGVNCTEVPVAIHADQLTPTWRVYSTGSNVFQTRAGCLIGAEYVNNSYECDIPIGAGICASYQTQTKSHRRARSVASQSIIAYTMSLGAENLVAYSNNSIAIPTNFTISVTTEILPVSMTKTSVDCTMYICGDSTECSNLLLQYGSFCTQLKRALTGIAVEQDKNTQEVFAQVKQIYKTPPIKYFGGFNFSQILPDPSKPSKRSFIEDLLFNKVTLADAGFIKQYGDCLGDIAARDLICAQKFNGLTVLPPLLTDEMIAQYTSALLAGTITSGWTFGAGAALQIPFAMQMAYRFNGIGVTQNVLYENQKLIANQFNSAIGKIQDSLSSTASALGKLQDVVNHNAQALNTLVKQLSSKFGAISSVLNDILSRLDKVEAEVQIDRLITGRLQSLQTYVTQQLIRAAEIRASANLAATKMSECVLGQSKRVDFCGKGYHLMSFPQSAPHGVVFLHVTYVPAQEKNFTTAPAICHDGKAHFPREGVFVSNGTHWFVTQRNFYEPQIITTDNTFVSGNCDVVIGIVNNTVYDPLQPELDSFKEELDKYFKNHTSPDVDLGDISGINASVVNIQKEIDRLNEVAKNLNESLIDLQELGKYEQYIKWPWYIWLGFIAGLIAIVMVTIMLCCMTSCCSCLKGCCSCGSCC

SEQ ID NO: 59 - protein, 1249 aa, synthetic construct
  REGION 1..1249: note = Omicron BA.4 Spike Del19
MFVFLVLLPLVSSQCVNLITRTQSYTNSFTRGVYYPDKVFRSSVLHSTQDLFLPFFSNVTWFHAISGTNGTKRFDNPVLPFNDGVYFASTEKSNIIRGWIFGTTLDSKTQSLLIVNNATNVVIKVCEFQFCNDPFLDVYYHKNNKSWMESEFRVYSSANNCTFEYVSQPFLMDLEGKQGNFKNLREFVFKNIDGYFKIYSKHTPINLGRDLPQGFSALEPLVDLPIGINITRFQTLLALHRSYLTPGDSSSGWTAGAAAYYVGYLQPRTFLLKYNENGTITDAVDCALDPLSETKCTLKSFTVEKGIYQTSNFRVQPTESIVRFPNITNLCPFDEVFNATRFASVYAWNRKRISNCVADYSVLYNFAPFFAFKCYGVSPTKLNDLCFTNVYADSFVIRGNEVSQIAPGQTGNIADYNYKLPDDFTGCVIAWNSNKLDSKVGGNYNYRYRLFRKSNLKPFERDISTEIYQAGNKPCNGVAGVNCYFPLQSYGFRPTYGVGHQPYRVVVLSFELLHAPATVCGPKKSTNLVKNKCVNFNFNGLTGTGVLTESNKKFLPFQQFGRDIADTTDAVRDPQTLEILDITPCSFGGVSVITPGTNTSNQVAVLYQGVNCTEVPVAIHADQLTPTWRVYSTGSNVFQTRAGCLIGAEYVNSSYECDIPIGAGICASYQTQTKSHRRARSVASQSIIAYTMSLGAENSVAYSNNSIAIPTNFTISVTTEILPVSMTKTSVDCTMYICGDSTECSNLLLQYGSFCTQLKRALTGIAVEQDKNTQEVFAQVKQIYKTPPIKYFGGFNFSQILPDPSKPSKRSFIEDLLFNKVTLADAGFIKQYGDCLGDIAARDLICAQKFNGLTVLPPLLTDEMIAQYTSALLAGTITSGWTFGAGAALQIPFAMQMAYRFNGIGVTQNVLYENQKLIANQFNSAIGKIQDSLSSTASALGKLQDVVNHNAQALNTLVKQLSSKFGAISSVLNDILSRLDKVEAEVQIDRLITGRLQSLQTYVTQQLIRAAEIRASANLAATKMSECVLGQSKRVDFCGKGYHLMSFPQSAPHGVVFLHVTYVPAQEKNFTTAPAICHDGKAHFPREGVFVSNGTHWFVTQRNFYEPQIITTDNTFVSGNCDVVIGIVNNTVYDPLQPELDSFKEELDKYFKNHTSPDVDLGDISGINASVVNIQKEIDRLNEVAKNLNESLIDLQELGKYEQYIKWPWYIWLGFIAGLIAIVMVTIMLCCMTSCCSCLKGCCSCGSCC

SEQ ID NO: 60 - protein, 1251 aa, synthetic construct
  REGION 1..1251: note = Omicron BA2 spike Del19
MFVFLVLLPLVSSQCVNLITRTQSYTNSFTRGVYYPDKVFRSSVLHSTQDLFLPFFSNVTWFHAIHVSGTNGTKRFDNPVLPFNDGVYFASTEKSNIIRGWIFGTTLDSKTQSLLIVNNATNVVIKVCEFQFCNDPFLDVYYHKNNKSWMESEFRVYSSANNCTFEYVSQPFLMDLEGKQGNFKNLREFVFKNIDGYFKIYSKHTPINLGRDLPQGFSALEPLVDLPIGINITRFQTLLALHRSYLTPGDSSSGWTAGAAAYYVGYLQPRTFLLKYNENGTITDAVDCALDPLSETKCTLKSFTVEKGIYQTSNFRVQPTESIVRFPNITNLCPFDEVFNATRFASVYAWNRKRISNCVADYSVLYNFAPFFAFKCYGVSPTKLNDLCFTNVYADSFVIRGNEVSQIAPGQTGNIADYNYKLPDDFTGCVIAWNSNKLDSKVGGNYNYLYRLFRKSNLKPFERDISTEIYQAGNKPCNGVAGFNCYFPLRSYGFRPTYGVGHQPYRVVVLSFELLHAPATVCGPKKSTNLVKNKCVNFNFNGLTGTGVLTESNKKFLPFQQFGRDIADTTDAVRDPQTLEILDITPCSFGGVSVITPGTNTSNQVAVLYQGVNCTEVPVAIHADQLTPTWRVYSTGSNVFQTRAGCLIGAEYVNNSYECDIPIGAGICASYQTQTKSHRRARSVASQSIIAYTMSLGAENSVAYSNNSIAIPTNFTISVTTEILPVSMTKTSVDCTMYICGDSTECSNLLLQYGSFCTQLKRALTGIAVEQDKNTQEVFAQVKQIYKTPPIKYFGGFNFSQILPDPSKPSKRSFIEDLLFNKVTLADAGFIKQYGDCLGDIAARDLICAQKFNGLTVLPPLLTDEMIAQYTSALLAGTITSGWTFGAGAALQIPFAMQMAYRFNGIGVTQNVLYENQKLIANQFNSAIGKIQDSLSSTASALGKLQDVVNHNAQALNTLVKQLSSKFGAISSVLNDILSRLDKVEAEVQIDRLITGRLQSLQTYVTQQLIRAAEIRASANLAATKMSECVLGQSKRVDFCGKGYHLMSFPQSAPHGVVFLHVTYVPAQEKNFTTAPAICHDGKAHFPREGVFVSNGTHWFVTQRNFYEPQIITTDNTFVSGNCDVVIGIVNNTVYDPLQPELDSFKEELDKYFKNHTSPDVDLGDISGINASVVNIQKEIDRLNEVAKNLNESLIDLQELGKYEQYIKWPWYIWLGFIAGLIAIVMVTIMLCCMTSCCSCLKGCCSCGSCC

SEQ ID NO: 61 - DNA, 9502 bp, synthetic construct
  misc_feature 1..9502: note = pVP22b SA Hexapro UTR
  source 1..9502: mol_type = other DNA
gacggatcgggagatctcccgatcccctatggtgcactctcagtacaatctgctctgatgccgcatagttaagccagtatctgctccctgcttgtgtgttggaggtcgctgagtagtgcgcgagcaaaatttaagctacaacaaggcaaggcttgaccgacaattgcatgaagaatctgcttagggttaggcgttttgcgctgcttcgcgatgtacgggccagatatacgcgttgacattgattattgactagttattaatagtaatcaattacggggtcattagttcatagcccatatatggagttccgcgttacataacttacggtaaatggcccgcctggctgaccgcccaacgacccccgcccattgacgtcaataatgacgtatgttcccatagtaacgccaatagggactttccattgacgtcaatgggtggagtatttacggtaaactgcccacttggcagtacatcaagtgtatcatatgccaagtacgccccctattgacgtcaatgacggtaaatggcccgcctggcattatgcccagtacatgaccttatgggactttcctacttggcagtacatctacgtattagtcatcgctattaccatggtgatgcggttttggcagtacatcaatgggcgtggatagcggtttgactcacggggatttccaagtctccaccccattgacgtcaatgggagtttgttttggcaccaaaatcaacgggactttccaaaatgtcgtaacaactccgccccattgacgcaaatgggcggtaggcgtgtacggtgggaggtctatataagcagagctctctggctaactagagaacccactgcttactggcttatcgaaattaatacgactcactatagggagacccaagctggctagccaccgagaataaactagtattcttctggtccccacagactcagagagaacccgccaccatgtttgtgttcctggtgctgctgccactggtgtccagccagtgtgtgaacttcaccaccaggacccaacttcctcctgcctacaccaactccttcaccaggggagtctactaccctgacaaggtgttcaggtcctctgtgctgcacagcacccaggacctgttcctgccattcttcagcaatgtgacctggttccatgccatccatgtgtctggcaccaatggcaccaagaggtttgccaaccctgtgctgccattcaatgatggagtctactttgccagcacagagaagagcaacatcatcaggggctggatttttggcaccaccctggacagcaagacccagtccctgctgattgtgaacaatgccaccaatgtggtgattaaggtgtgtgagttccagttctgtaatgacccattcctgggagtctactaccacaagaacaacaagtcctggatggagtctgagttcagggtctactcctctgccaacaactgtacctttgaatatgtgagccaaccattcctgatggacttggagggcaagcagggcaacttcaagaacctgagggagtttgtgttcaagaacattgatggctacttcaagatttacagcaaacacacaccaatcaacctggtgaggggcctgccacagggcttctctgccttggaaccactggtggacctgccaattggcatcaacatcaccaggttccagaccctgctggctctgcacatttcctacctgacacctggagactcctcctctggctggacagcaggagcagcagcctactatgtgggctacctccaaccaaggaccttcctgctgaaatacaatgagaatggcaccatcacagatgctgtggactgtgccctggacccactgtctgagaccaagtgtaccctgaaatccttcacagtggagaagggcatctaccagaccagcaacttcagggtccaaccaacagagagcattgtgaggtttccaaacatcaccaacctgtgtccatttggagaggtgttcaatgccaccaggtttgcctctgtctatgcctggaacaggaagaggattagcaactgtgtggctgactactctgtgctctacaactctgcctccttcagcaccttcaagtgttatggagtgagcccaaccaaactgaatgacctgtgtttcaccaatgtctatgctgactcctttgtgattaggggagatgaggtgagacagattgcccctggacaaacaggcaacattgctgactacaactacaaactgcctgatgacttcacaggctgtgtgattgcctggaacagcaacaacctggacagcaaggtgggaggcaactacaactacctctacagactgttcaggaagagcaacctgaaaccatttgagagggacatcagcacagagatttaccaggctggcagcacaccatgtaatggagtgaagggcttcaactgttactttccactccaatcctatggcttccaaccaacctacggagtgggctaccaaccatacagggtggtggtgctgtcctttgaactgctccatgcccctgccacagtgtgtggaccaaagaagagcaccaacctggtgaagaacaagtgtgtgaacttcaacttcaatggactgacaggcacaggagtgctgacagagagcaacaagaagttcctgccattccaacagtttggcagggacattgctgacaccacagatgctgtgagggacccacagaccttggagattctggacatcacaccatgttcctttggaggagtgtctgtgattacacctggcaccaacaccagcaaccaggtggctgtgctctaccaggatgtgaactgtactgaggtgcctgtggctatccatgctgaccaacttacaccaacctggagggtctacagcacaggcagcaatgtgttccagaccagggctggctgtctgattggagcagagcatgtgaacaactcctatgagtgtgacatcccaattggagcaggcatctgtgcctcctaccagacccagaccaacagcccaggctctgcatcttctgtggcaagccagagcatcattgcctacacaatgagtctgggagtggagaactctgtggcttacagcaacaacagcattgccatcccaaccaacttcaccatctctgtgaccacagagattctgcctgtgagtatgaccaagacctctgtggactgtacaatgtatatctgtggagacagcacagagtgtagcaacctgctgctccaatatggctccttctgtacccaacttaacagggctctgacaggcattgctgtggaacaggacaagaacacccaggaggtgtttgcccaggtgaagcagatttacaagacacctccaatcaaggactttggaggcttcaacttcagccagattctgcctgacccaagcaagccaagcaagaggtcccctattgaggacctgctgttcaacaaggtgaccctggctgatgctggcttcatcaagcaatatggagactgtctgggagacatcgctgctagggacctgatttgtgcccagaagttcaatggactgacagtgctgcctccactgctgacagatgagatgattgcccaatacacctctgccctgctggctggaaccatcacctctggatggacctttggagcaggaccagccctccaaatcccatttccaatgcagatggcttacaggttcaatggcattggagtgacccagaatgtgctctatgagaaccagaaactgattgccaaccagttcaactctgccattggcaagattcaggactccctgtccagcacaccatctgccctgggcaagctccaagatgtggtgaaccagaatgcccaggctctgaacaccctggtgaagcaactttccagcaactttggagccatctcctctgtgctgaatgacatcctgagcagactggacccaccagaggctgaggtccagattgacagactgattacaggcagactccaatccctccaaacctatgtgacccaacaacttatcagggctgctgagattagggcatctgccaacctggctgccaccaagatgagtgagtgtgtgctgggacaaagcaagagggtggacttctgtggcaagggctaccacctgatgagttttccacagtctgcccctcatggagtggtgttcctgcatgtgacctatgtgcctgcccaggagaagaacttcaccacagcccctgccatctgccatgatggcaaggctcactttccaagggagggagtgtttgtgagcaatggcacccactggtttgtgacccagaggaacttctatgaaccacagattatcaccacagacaacacctttgtgtctggcaactgtgatgtggtgattggcattgtgaacaacacagtctatgacccactccaacctgaactggactccttcaaggaggaactggacaaatacttcaagaaccacaccagccctgatgtggacctgggagacatctctggcatcaatgcctctgtggtgaacatccagaaggagattgacagactgaatgaggtggctaagaacctgaatgagtccctgattgacctccaagaactgggcaaatatgaacaatacatcaagtggccatggtacatctggctgggcttcattgctggactgattgccattgtgatggtgaccataatgctgtgttgtatgacctcctgttgttcctgtctgaaaggctgttgttcctgtggctcctgttgtaagtttgatgaggatgactctgaacctgtgctgaaaggagtgaaactgcactacacctgatgactcgagctggtactgcatgcacgcaatgctagctgcccctttcccgtcctgggtaccccgagtctcccccgacctcgggtcccaggtatgctcccacctccacctgccccactcaccacctctgctagttccagacacctcccaagcacgcagcaatgcagctcaaaacgcttagcctagccacacccccacgggaaacagcagtgattaacctttagcaataaacgaaagtttaactaagctatactaaccccagggttggtcaatttcgtgccagccacaccctggagctagcaaaccgctgatcagcctcgactgtgccttctagttgccagccatctgttgtttgcccctcccccgtgccttccttgaccctggaaggtgccactcccactgtcctttcctaataaaatgaggaaattgcatcgcattgtctgagtaggtgtcattctattctggggggtggggtggggcaggacagcaagggggaggattgggaagacaatagcaggcatgctggggatgcggtgggctctatggcttctgaggcggaaagaaccagctggggctctagggggtatccccacgcgccctgtagcggcgcattaagcgcggcgggtgtggtggttacgcgcagcgtgaccgctacacttgccagcgccctagcgcccgctcctttcgctttcttcccttcctttctcgccacgttcgccggctttccccgtcaagctctaaatcgggggctccctttagggttccgatttagtgctttacggcacctcgaccccaaaaaacttgattagggtgatggttcacgtagtgggccatcgccctgatagacggtttttcgccctttgacgttggagtccacgttctttaatagtggactcttgttccaaactggaacaacactcaaccctatctcggtctattcttttgatttataagggattttgccgatttcggcctattggttaaaaaatgagctgatttaacaaaaatttaacgcgaattaattctgtggaatgtgtgtcagttagggtgtggaaagtccccaggctccccagcaggcagaagtatgcaaagcatgcatctcaattagtcagcaaccaggtgtggaaagtccccaggctccccagcaggcagaagtatgcaaagcatgcatctcaattagtcagcaaccatagtcccgcccctaactccgcccatcccgcccctaactccgcccagttccgcccattctccgccccatggctgactaattttttttatttatgcagaggccgaggccgcctctgcctctgagctattccagaagtagtgaggaggcttttttggaggcctaggcttttgcaaaaagctcccgggagcttgtatatccattttcggatctgatcaagagacaggatgaggatcgtttcgcatgattgaacaagatggattgcacgcaggttctccggccgcttgggtggagaggctattcggctatgactgggcacaacagacaatcggctgctctgatgccgccgtgttccggctgtcagcgcaggggcgcccggttctttttgtcaagaccgacctgtccggtgccctgaatgaactgcaggacgaggcagcgcggctatcgtggctggccacgacgggcgttccttgcgcagctgtgctcgacgttgtcactgaagcgggaagggactggctgctattgggcgaagtgccggggcaggatctcctgtcatctcaccttgctcctgccgagaaagtatccatcatggctgatgcaatgcggcggctgcatacgcttgatccggctacctgcccattcgaccaccaagcgaaacatcgcatcgagcgagcacgtactcggatggaagccggtcttgtcgatcaggatgatctggacgaagagcatcaggggctcgcgccagccgaactgttcgccaggctcaaggcgcgcatgcccgacggcgaggatctcgtcgtgacccatggcgatgcctgcttgccgaatatcatggtggaaaatggccgcttttctggattcatcgactgtggccggctgggtgtggcggaccgctatcaggacatagcgttggctacccgtgatattgctgaagagcttggcggcgaatgggctgaccgcttcctcgtgctttacggtatcgccgctcccgattcgcagcgcatcgccttctatcgccttcttgacgagttcttctgagcgggactctggggttcgaaatgaccgaccaagcgacgcccaacctgccatcacgagatttcgattccaccgccgccttctatgaaaggttgggcttcggaatcgttttccgggacgccggctggatgatcctccagcgcggggatctcatgctggagttcttcgcccaccccaacttgtttattgcagcttataatggttacaaataaagcaatagcatcacaaatttcacaaataaagcatttttttcactgcattctagttgtggtttgtccaaactcatcaatgtatcttatcatgtctgtataccgtcgacctctagctagagcttggcgtaatcatggtcatagctgtttcctgtgtgaaattgttatccgctcacaattccacacaacatacgagccggaagcataaagtgtaaagcctggggtgcctaatgagtgagctaactcacattaattgcgttgcgctcactgcccgctttccagtcgggaaacctgtcgtgccagctgcattaatgaatcggccaacgcgcggggagaggcggtttgcgtattgggcgctcttccgcttcctcgctcactgactcgctgcgctcggtcgttcggctgcggcgagcggtatcagctcactcaaaggcggtaatacggttatccacagaatcaggggataacgcaggaaagaacatgtgagcaaaaggccagcaaaaggccaggaaccgtaaaaaggccgcgttgctggcgtttttccataggctccgcccccctgacgagcatcacaaaaatcgacgctcaagtcagaggtggcgaaacccgacaggactataaagataccaggcgtttccccctggaagctccctcgtgcgctctcctgttccgaccctgccgcttaccggatacctgtccgcctttctcccttcgggaagcgtggcgctttctcatagctcacgctgtaggtatctcagttcggtgtaggtcgttcgctccaagctgggctgtgtgcacgaaccccccgttcagcccgaccgctgcgccttatccggtaactatcgtcttgagtccaacccggtaagacacgacttatcgccactggcagcagccactggtaacaggattagcagagcgaggtatgtaggcggtgctacagagttcttgaagtggtggcctaactacggctacactagaagaacagtatttggtatctgcgctctgctgaagccagttaccttcggaaaaagagttggtagctcttgatccggcaaacaaaccaccgctggtagcggtggtttttttgtttgcaagcagcagattacgcgcagaaaaaaaggatctcaagaagatcctttgatcttttctacggggtctgacgctcagtggaacgaaaactcacgttaagggattttggtcatgagattatcaaaaaggatcttcacctagatccttttaaattaaaaatgaagttttaaatcaatctaaagtatatatgagtaaacttggtctgacagttaccaatgcttaatcagtgaggcacctatctcagcgatctgtctatttcgttcatccatagttgcctgactccccgtcgtgtagataactacgatacgggagggcttaccatctggccccagtgctgcaatgataccgcgagacccacgctcaccggctccagatttatcagcaataaaccagccagccggaagggccgagcgcagaagtggtcctgcaactttatccgcctccatccagtctattaattgttgccgggaagctagagtaagtagttcgccagttaatagtttgcgcaacgttgttgccattgctacaggcatcgtggtgtcacgctcgtcgtttggtatggcttcattcagctccggttcccaacgatcaaggcgagttacatgatcccccatgttgtgcaaaaaagcggttagctccttcggtcctccgatcgttgtcagaagtaagttggccgcagtgttatcactcatggttatggcagcactgcataattctcttactgtcatgccatccgtaagatgcttttctgtgactggtgagtactcaaccaagtcattctgagaatagtgtatgcggcgaccgagttgctcttgcccggcgtcaatacgggataataccgcgccacatagcagaactttaaaagtgctcatcattggaaaacgttcttcggggcgaaaactctcaaggatcttaccgctgttgagatccagttcgatgtaacccactcgtgcacccaactgatcttcagcatcttttactttcaccagcgtttctgggtgagcaaaaacaggaaggcaaaatgccgcaaaaaagggaataagggcgacacggaaatgttgaatactcatactcttcctttttcaatattattgaagcatttatcagggttattgtctcatgagcggatacatatttgaatgtatttagaaaaataaacaaataggggttccgcgcacatttccccgaaaagtgccacctgacgtc

SEQ ID NO: 62 - DNA, 9180 bp, synthetic construct
  misc_feature 1..9180: note = pVP28 pcDNA3.1 Indian B.1.617
  source 1..9180: mol_type = other DNA
gacggatcgggagatctcccgatcccctatggtgcactctcagtacaatctgctctgatgccgcatagttaagccagtatctgctccctgcttgtgtgttggaggtcgctgagtagtgcgcgagcaaaatttaagctacaacaaggcaaggcttgaccgacaattgcatgaagaatctgcttagggttaggcgttttgcgctgcttcgcgatgtacgggccagatatacgcgttgacattgattattgactagttattaatagtaatcaattacggggtcattagttcatagcccatatatggagttccgcgttacataacttacggtaaatggcccgcctggctgaccgcccaacgacccccgcccattgacgtcaataatgacgtatgttcccatagtaacgccaatagggactttccattgacgtcaatgggtggagtatttacggtaaactgcccacttggcagtacatcaagtgtatcatatgccaagtacgccccctattgacgtcaatgacggtaaatggcccgcctggcattatgcccagtacatgaccttatgggactttcctacttggcagtacatctacgtattagtcatcgctattaccatggtgatgcggttttggcagtacatcaatgggcgtggatagcggtttgactcacggggatttccaagtctccaccccattgacgtcaatgggagtttgttttggcaccaaaatcaacgggactttccaaaatgtcgtaacaactccgccccattgacgcaaatgggcggtaggcgtgtacggtgggaggtctatataagcagagctctctggctaactagagaacccactgcttactggcttatcgaaattaatacgactcactatagggagacccaagctggctagccaccatgtttgtgttcctggtgctgctgccactggtgtccagccagtgtgtgaacctgaccaccaggacccaacttcctcctgcctacaccaactccttcaccaggggagtctactaccctgacaaggtgttcaggtcctctgtgctgcacagcacccaggacctgttcctgccattcttcagcaatgtgacctggttccatgccatccatgtgtctggcaccaatggcaccaagaggtttgacaaccctgtgctgccattcaatgatggagtctactttgccagcacagagaagagcaacatcatcaggggctggatttttggcaccaccctggacagcaagacccagtccctgctgattgtgaacaatgccaccaatgtggtgattaaggtgtgtgagttccagttctgtaatgacccattcctggacgtctactaccacaagaacaacaagtcctggatgaagtctgagttcagggtctactcctctgccaacaactgtacctttgaatatgtgagccaaccattcctgatggacttggagggcaagcagggcaacttcaagaacctgagggagtttgtgttcaagaacattgatggctacttcaagatttacagcaaacacacaccaatcaacctggtgagggacctgccacagggcttctctgccttggaaccactggtggacctgccaattggcatcaacatcaccaggttccagaccctgctggctctgcacaggtcctacctgacacctggagactcctcctctggctggacagcaggagcagcagcctactatgtgggctacctccaaccaaggaccttcctgctgaaatacaatgagaatggcaccatcacagatgctgtggactgtgccctggacccactgtctgagaccaagtgtaccctgaaatccttcacagtggagaagggcatctaccagaccagcaacttcagggtccaaccaacagagagcattgtgaggtttccaaacatcaccaacctgtgtccatttggagaggtgttcaatgccaccaggtttgcctctgtctatgcctggaacaggaagaggattagcaactgtgtggctgactactctgtgctctacaactctgcctccttcagcaccttcaagtgttatggagtgagcccaaccaaactgaatgacctgtgtttcaccaatgtctatgctgactcctttgtgattaggggagatgaggtgagacagattgcccctggacaaacaggcaagattgctgactacaactacaaactgcctgatgacttcacaggctgtgtgattgcctggaacagcaacaacctggacagcaaggtgggaggcaactacaactacaggtacagactgttcaggaagagcaacctgaaaccatttgagagggacatcagcacagagatttaccaggctggcagcacaccatgtaatggagtgcagggcttcaactgttactttccactccaatcctatggcttccaaccaaccaatggagtgggctaccaaccatacagggtggtggtgctgtcctttgaactgctccatgcccctgccacagtgtgtggaccaaagaagagcaccaacctggtgaagaacaagtgtgtgaacttcaacttcaatggactgacaggcacaggagtgctgacagagagcaacaagaagttcctgccattccaacagtttggcagggacattgctgacaccacagatgctgtgagggacccacagaccttggagattctggacatcacaccatgttcctttggaggagtgtctgtgattacacctggcaccaacaccagcaaccaggtggctgtgctctaccagggagtgaactgtactgaggtgcctgtggctatccatgctgaccaacttacaccaacctggagggtctacagcacaggcagcaatgtgttccagaccagggctggctgtctgattggagcagagcatgtgaacaactcctatgagtgtgacatcccaattggagcaggcatctgtgcctcctaccagacccagaccaacagcaggaggagggcaaggtctgtggcaagccagagcatcattgcctacacaatgagtctgggagcagagaactctgtggcttacagcaacaacagcattgccatcccaaccaacttcaccatctctgtgaccacagagattctgcctgtgagtatgaccaagacctctgtggactgtacaatgtatatctgtggagacagcacagagtgtagcaacctgctgctccaatatggctccttctgtacccaacttaacagggctctgacaggcattgctgtggaacaggacaagaacacccaggaggtgtttgcccaggtgaagcagatttacaagacacctccaatcaaggactttggaggcttcaacttcagccagattctgcctgacccaagcaagccaagcaagaggtccttcattgaggacctgctgttcaacaaggtgaccctggctgatgctggcttcatcaagcaatatggagactgtctgggagacattgctgccagggacctgatttgtgcccagaagttcaatggactgacagtgctgcctccactgctgacagatgagatgattgcccaatacacctctgccctgctggctggcaccatcacctctggctggacctttggagcaggagcagccctccaaatcccatttgctatgcagatggcttacaggttcaatggcattggagtgacccagaatgtgctctatgagaaccagaaactgattgccaaccagttcaactctgccattggcaagattcaggactccctgtccagcacagcctctgccctgggcaaactccaagatgtggtgaaccagaatgcccaggctctgaacaccctggtgaagcaactttccagcaactttggagccatctcctctgtgctgaatgacatcctgagcagactggacaaggtggaggctgaggtccagattgacagactgattacaggcagactccaatccctccaaacctatgtgacccaacaacttatcagggctgctgagattagggcatctgccaacctggctgccaccaagatgagtgagtgtgtgctgggacaaagcaagagggtggacttctgtggcaagggctaccacctgatgagttttccacagtctgcccctcatggagtggtgttcctgcatgtgacctatgtgcctgcccatgagaagaacttcaccacagcccctgccatctgccatgatggcaaggctcactttccaagggagggagtgtttgtgagcaatggcacccactggtttgtgacccagaggaacttctatgaaccacagattatcaccacagacaacacctttgtgtctggcaactgtgatgtggtgattggcattgtgaacaacacagtctatgacccactccaacctgaactggactccttcaaggaggaactggacaaatacttcaagaaccacaccagccctgatgtggacctgggagacatctctggcatcaatgcctctgtggtgaacatccagaaggagattgacagactgaatgaggtggctaagaacctgaatgagtccctgattgacctccaagaactgggcaaatatgaacaatacatcaagtggccatggtacatctggctgggcttcattgctggactgattgccattgtgatggtgaccataatgctgtgttgtatgacctcctgttgttcctgtctgaaaggctgttgttcctgtggctcctgttgtaagtttgatgaggatgactctgaacctgtgctgaaaggagtgaaactgcactacacctgaggatccgagctcggtaccaagcttaagtttaaaccgctgatcagcctcgactgtgccttctagttgccagccatctgttgtttgcccctcccccgtgccttccttgaccctggaaggtgccactcccactgtcctttcctaataaaatgaggaaattgcatcgcattgtctgagtaggtgtcattctattctggggggtggggtggggcaggacagcaagggggaggattgggaagacaatagcaggcatgctggggatgcggtgggctctatggcttctgaggcggaaagaaccagctggggctctagggggtatccccacgcgccctgtagcggcgcattaagcgcggcgggtgtggtggttacgcgcagcgtgaccgctacacttgccagcgccctagcgcccgctcctttcgctttcttcccttcctttctcgccacgttcgccggctttccccgtcaagctctaaatcgggggctccctttagggttccgatttagtgctttacggcacctcgaccccaaaaaacttgattagggtgatggttcacgtagtgggccatcgccctgatagacggtttttcgccctttgacgttggagtccacgttctttaatagtggactcttgttccaaactggaacaacactcaaccctatctcggtctattcttttgatttataagggattttgccgatttcggcctattggttaaaaaatgagctgatttaacaaaaatttaacgcgaattaattctgtggaatgtgtgtcagttagggtgtggaaagtccccaggctccccagcaggcagaagtatgcaaagcatgcatctcaattagtcagcaaccaggtgtggaaagtccccaggctccccagcaggcagaagtatgcaaagcatgcatctcaattagtcagcaaccatagtcccgcccctaactccgcccatcccgcccctaactccgcccagttccgcccattctccgccccatggctgactaattttttttatttatgcagaggccgaggccgcctctgcctctgagctattccagaagtagtgaggaggcttttttggaggcctaggcttttgcaaaaagctcccgggagcttgtatatccattttcggatctgatcaagagacaggatgaggatcgtttcgcatgattgaacaagatggattgcacgcaggttctccggccgcttgggtggagaggctattcggctatgactgggcacaacagacaatcggctgctctgatgccgccgtgttccggctgtcagcgcaggggcgcccggttctttttgtcaagaccgacctgtccggtgccctgaatgaactgcaggacgaggcagcgcggctatcgtggctggccacgacgggcgttccttgcgcagctgtgctcgacgttgtcactgaagcgggaagggactggctgctattgggcgaagtgccggggcaggatctcctgtcatctcaccttgctcctgccgagaaagtatccatcatggctgatgcaatgcggcggctgcatacgcttgatccggctacctgcccattcgaccaccaagcgaaacatcgcatcgagcgagcacgtactcggatggaagccggtcttgtcgatcaggatgatctggacgaagagcatcaggggctcgcgccagccgaactgttcgccaggctcaaggcgcgcatgcccgacggcgaggatctcgtcgtgacccatggcgatgcctgcttgccgaatatcatggtggaaaatggccgcttttctggattcatcgactgtggccggctgggtgtggcggaccgctatcaggacatagcgttggctacccgtgatattgctgaagagcttggcggcgaatgggctgaccgcttcctcgtgctttacggtatcgccgctcccgattcgcagcgcatcgccttctatcgccttcttgacgagttcttctgagcgggactctggggttcgaaatgaccgaccaagcgacgcccaacctgccatcacgagatttcgattccaccgccgccttctatgaaaggttgggcttcggaatcgttttccgggacgccggctggatgatcctccagcgcggggatctcatgctggagttcttcgcccaccccaacttgtttattgcagcttataatggttacaaataaagcaatagcatcacaaatttcacaaataaagcatttttttcactgcattctagttgtggtttgtccaaactcatcaatgtatcttatcatgtctgtataccgtcgacctctagctagagcttggcgtaatcatggtcatagctgtttcctgtgtgaaattgttatccgctcacaattccacacaacatacgagccggaagcataaagtgtaaagcctggggtgcctaatgagtgagctaactcacattaattgcgttgcgctcactgcccgctttccagtcgggaaacctgtcgtgccagctgcattaatgaatcggccaacgcgcggggagaggcggtttgcgtattgggcgctcttccgcttcctcgctcactgactcgctgcgctcggtcgttcggctgcggcgagcggtatcagctcactcaaaggcggtaatacggttatccacagaatcaggggataacgcaggaaagaacatgtgagcaaaaggccagcaaaaggccaggaaccgtaaaaaggccgcgttgctggcgtttttccataggctccgcccccctgacgagcatcacaaaaatcgacgctcaagtcagaggtggcgaaacccgacaggactataaagataccaggcgtttccccctggaagctccctcgtgcgctctcctgttccgaccctgccgcttaccggatacctgtccgcctttctcccttcgggaagcgtggcgctttctcatagctcacgctgtaggtatctcagttcggtgtaggtcgttcgctccaagctgggctgtgtgcacgaaccccccgttcagcccgaccgctgcgccttatccggtaactatcgtcttgagtccaacccggtaagacacgacttatcgccactggcagcagccactggtaacaggattagcagagcgaggtatgtaggcggtgctacagagttcttgaagtggtggcctaactacggctacactagaagaacagtatttggtatctgcgctctgctgaagccagttaccttcggaaaaagagttggtagctcttgatccggcaaacaaaccaccgctggtagcggtggtttttttgtttgcaagcagcagattacgcgcagaaaaaaaggatctcaagaagatcctttgatcttttctacggggtctgacgctcagtggaacgaaaactcacgttaagggattttggtcatgagattatcaaaaaggatcttcacctagatccttttaaattaaaaatgaagttttaaatcaatctaaagtatatatgagtaaacttggtctgacagttaccaatgcttaatcagtgaggcacctatctcagcgatctgtctatttcgttcatccatagttgcctgactccccgtcgtgtagataactacgatacgggagggcttaccatctggccccagtgctgcaatgataccgcgagacccacgctcaccggctccagatttatcagcaataaaccagccagccggaagggccgagcgcagaagtggtcctgcaactttatccgcctccatccagtctattaattgttgccgggaagctagagtaagtagttcgccagttaatagtttgcgcaacgttgttgccattgctacaggcatcgtggtgtcacgctcgtcgtttggtatggcttcattcagctccggttcccaacgatcaaggcgagttacatgatcccccatgttgtgcaaaaaagcggttagctccttcggtcctccgatcgttgtcagaagtaagttggccgcagtgttatcactcatggttatggcagcactgcataattctcttactgtcatgccatccgtaagatgcttttctgtgactggtgagtactcaaccaagtcattctgagaatagtgtatgcggcgaccgagttgctcttgcccggcgtcaatacgggataataccgcgccacatagcagaactttaaaagtgctcatcattggaaaacgttcttcggggcgaaaactctcaaggatcttaccgctgttgagatccagttcgatgtaacccactcgtgcacccaactgatcttcagcatcttttactttcaccagcgtttctgggtgagcaaaaacaggaaggcaaaatgccgcaaaaaagggaataagggcgacacggaaatgttgaatactcatactcttcctttttcaatattattgaagcatttatcagggttattgtctcatgagcggatacatatttgaatgtatttagaaaaataaacaaataggggttccgcgcacatttccccgaaaagtgccacctgacgtc

SEQ ID NO: 63 - DNA, 9499 bp, synthetic construct
  misc_feature 1..9499: note = pVP29b Indian B.1.617 Hexapro UTR
  source 1..9499: mol_type = other DNA
gacggatcgggagatctcccgatcccctatggtgcactctcagtacaatctgctctgatgccgcatagttaagccagtatctgctccctgcttgtgtgttggaggtcgctgagtagtgcgcgagcaaaatttaagctacaacaaggcaaggcttgaccgacaattgcatgaagaatctgcttagggttaggcgttttgcgctgcttcgcgatgtacgggccagatatacgcgttgacattgattattgactagttattaatagtaatcaattacggggtcattagttcatagcccatatatggagttccgcgttacataacttacggtaaatggcccgcctggctgaccgcccaacgacccccgcccattgacgtcaataatgacgtatgttcccatagtaacgccaatagggactttccattgacgtcaatgggtggagtatttacggtaaactgcccacttggcagtacatcaagtgtatcatatgccaagtacgccccctattgacgtcaatgacggtaaatggcccgcctggcattatgcccagtacatgaccttatgggactttcctacttggcagtacatctacgtattagtcatcgctattaccatggtgatgcggttttggcagtacatcaatgggcgtggatagcggtttgactcacggggatttccaagtctccaccccattgacgtcaatgggagtttgttttggcaccaaaatcaacgggactttccaaaatgtcgtaacaactccgccccattgacgcaaatgggcggtaggcgtgtacggtgggaggtctatataagcagagctctctggctaactagagaacccactgcttactggcttatcgaaattaatacgactcactatagggagacccaagctggctagccaccgagaataaactagtattcttctggtccccacagactcagagagaacccgccaccatgtttgtgttcctggtgctgctgccactggtgtccagccagtgtgtgaacctgaccaccaggacccaacttcctcctgcctacaccaactccttcaccaggggagtctactaccctgacaaggtgttcaggtcctctgtgctgcacagcacccaggacctgttcctgccattcttcagcaatgtgacctggttccatgccatccatgtgtctggcaccaatggcaccaagaggtttgacaaccctgtgctgccattcaatgatggagtctactttgccagcacagagaagagcaacatcatcaggggctggatttttggcaccaccctggacagcaagacccagtccctgctgattgtgaacaatgccaccaatgtggtgattaaggtgtgtgagttccagttctgtaatgacccattcctggacgtctactaccacaagaacaacaagtcctggatgaagtctgagttcagggtctactcctctgccaacaactgtacctttgaatatgtgagccaaccattcctgatggacttggagggcaagcagggcaacttcaagaacctgagggagtttgtgttcaagaacattgatggctacttcaagatttacagcaaacacacaccaatcaacctggtgagggacctgccacagggcttctctgccttggaaccactggtggacctgccaattggcatcaacatcaccaggttccagaccctgctggctctgcacaggtcctacctgacacctggagactcctcctctggctggacagcaggagcagcagcctactatgtgggctacctccaaccaaggaccttcctgctgaaatacaatgagaatggcaccatcacagatgctgtggactgtgccctggacccactgtctgagaccaagtgtaccctgaaatccttcacagtggagaagggcatctaccagaccagcaacttcagggtccaaccaacagagagcattgtgaggtttccaaacatcaccaacctgtgtccatttggagaggtgttcaatgccaccaggtttgcctctgtctatgcctggaacaggaagaggattagcaactgtgtggctgactactctgtgctctacaactctgcctccttcagcaccttcaagtgttatggagtgagcccaaccaaactgaatgacctgtgtttcaccaatgtctatgctgactcctttgtgattaggggagatgaggtgagacagattgcccctggacaaacaggcaagattgctgactacaactacaaactgcctgatgacttcacaggctgtgtgattgcctggaacagcaacaacctggacagcaaggtgggaggcaactacaactacaggtacagactgttcaggaagagcaacctgaaaccatttgagagggacatcagcacagagatttaccaggctggcagcacaccatgtaatggagtgcagggcttcaactgttactttccactccaatcctatggcttccaaccaaccaatggagtgggctaccaaccatacagggtggtggtgctgtcctttgaactgctccatgcccctgccacagtgtgtggaccaaagaagagcaccaacctggtgaagaacaagtgtgtgaacttcaacttcaatggactgacaggcacaggagtgctgacagagagcaacaagaagttcctgccattccaacagtttggcagggacattgctgacaccacagatgctgtgagggacccacagaccttggagattctggacatcacaccatgttcctttggaggagtgtctgtgattacacctggcaccaacaccagcaaccaggtggctgtgctctaccagggagtgaactgtactgaggtgcctgtggctatccatgctgaccaacttacaccaacctggagggtctacagcacaggcagcaatgtgttccagaccagggctggctgtctgattggagcagagcatgtgaacaactcctatgagtgtgacatcccaattggagcaggcatctgtgcctcctaccagacccagaccaacagcaggggctctgcatcttctgtggcaagccagagcatcattgcctacacaatgagtctgggagcagagaactctgtggcttacagcaacaacagcattgccatcccaaccaacttcaccatctctgtgaccacagagattctgcctgtgagtatgaccaagacctctgtggactgtacaatgtatatctgtggagacagcacagagtgtagcaacctgctgctccaatatggctccttctgtacccaacttaacagggctctgacaggcattgctgtggaacaggacaagaacacacaggaggtgtttgcccaggtgaagcagatttacaagacacctccaatcaaggactttggaggcttcaacttcagccagattctgcctgacccaagcaagccaagcaagaggtcccctattgaggacctgctgttcaacaaggtgaccctggctgatgctggcttcatcaagcaatatggagactgtctgggagacattgctgccagggacctgatttgtgcccagaagttcaatggactgacagtgctgcctccactgctgacagatgagatgattgcccaatacacctctgccctgctggctggcaccatcacctctggctggacctttggagcaggaccagccctccaaatcccatttccaatgcagatggcttacaggttcaatggcattggagtgacccagaatgtgctctatgagaaccagaaactgattgccaaccagttcaactctgccattggcaagattcaggactccctgtccagcacaccatctgccctgggcaaactccaagatgtggtgaaccagaatgcccaggctctgaacaccctggtgaagcaactttccagcaactttggagccatctcctctgtgctgaatgacatcctgagcagactggacccaccagaggctgaggtccagattgacagactgattacaggcagactccaatccctccaaacctatgtgacccaacaacttatcagggctgctgagattagggcatctgccaacctggctgccaccaagatgagtgagtgtgtgctgggacaaagcaagagggtggacttctgtggcaagggctaccacctgatgagttttccacagtctgcccctcatggagtggtgttcctgcatgtgacctatgtgcctgcccatgagaagaacttcaccacagcccctgccatctgccatgatggcaaggctcactttccaagggagggagtgtttgtgagcaatggcacccactggtttgtgacccagaggaacttctatgaaccacagattatcaccacagacaacacctttgtgtctggcaactgtgatgtggtgattggcattgtgaacaacacagtctatgacccactccaacctgaactggactccttcaaggaggaactggacaaatacttcaagaaccacaccagccctgatgtggacctgggagacatctctggcatcaatgcctctgtggtgaacatccagaaggagattgacagactgaatgaggtggctaagaacctgaatgagtccctgattgacctccaagaactgggcaaatatgaacaatacatcaagtggccatggtacatctggctgggcttcattgctggactgattgccattgtgatggtgaccataatgctgtgttgtatgacctcctgttgttcctgtctgaaaggctgttgttcctgtggctcctgttgtaagtttgatgaggatgactctgaacctgtgctgaaaggagtgaaactgcactacacctgactcgagctggtactgcatgcacgcaatgctagctgcccctttcccgtcctgggtaccccgagtctcccccgacctcgggtcccaggtatgctcccacctccacctgccccactcaccacctctgctagttccagacacctcccaagcacgcagcaatgcagctcaaaacgcttagcctagccacacccccacgggaaacagcagtgattaacctttagcaataaacgaaagtttaactaagctatactaaccccagggttggtcaatttcgtgccagccacaccctggagctagcaaaccgctgatcagcctcgactgtgccttctagttgccagccatctgttgtttgcccctcccccgtgccttccttgaccctggaaggtgccactcccactgtcctttcctaataaaatgaggaaattgcatcgcattgtctgagtaggtgtcattctattctggggggtggggtggggcaggacagcaagggggaggattgggaagacaatagcaggcatgctggggatgcggtgggctctatggcttctgaggcggaaagaaccagctggggctctagggggtatccccacgcgccctgtagcggcgcattaagcgcggcgggtgtggtggttacgcgcagcgtgaccgctacacttgccagcgccctagcgcccgctcctttcgctttcttcccttcctttctcgccacgttcgccggctttccccgtcaagctctaaatcgggggctccctttagggttccgatttagtgctttacggcacctcgaccccaaaaaacttgattagggtgatggttcacgtagtgggccatcgccctgatagacggtttttcgccctttgacgttggagtccacgttctttaatagtggactcttgttccaaactggaacaacactcaaccctatctcggtctattcttttgatttataagggattttgccgatttcggcctattggttaaaaaatgagctgatttaacaaaaatttaacgcgaattaattctgtggaatgtgtgtcagttagggtgtggaaagtccccaggctccccagcaggcagaagtatgcaaagcatgcatctcaattagtcagcaaccaggtgtggaaagtccccaggctccccagcaggcagaagtatgcaaagcatgcatctcaattagtcagcaaccatagtcccgcccctaactccgcccatcccgcccctaactccgcccagttccgcccattctccgccccatggctgactaattttttttatttatgcagaggccgaggccgcctctgcctctgagctattccagaagtagtgaggaggcttttttggaggcctaggcttttgcaaaaagctcccgggagcttgtatatccattttcggatctgatcaagagacaggatgaggatcgtttcgcatgattgaacaagatggattgcacgcaggttctccggccgcttgggtggagaggctattcggctatgactgggcacaacagacaatcggctgctctgatgccgccgtgttccggctgtcagcgcaggggcgcccggttctttttgtcaagaccgacctgtccggtgccctgaatgaactgcaggacgaggcagcgcggctatcgtggctggccacgacgggcgttccttgcgcagctgtgctcgacgttgtcactgaagcgggaagggactggctgctattgggcgaagtgccggggcaggatctcctgtcatctcaccttgctcctgccgagaaagtatccatcatggctgatgcaatgcggcggctgcatacgcttgatccggctacctgcccattcgaccaccaagcgaaacatcgcatcgagcgagcacgtactcggatggaagccggtcttgtcgatcaggatgatctggacgaagagcatcaggggctcgcgccagccgaactgttcgccaggctcaaggcgcgcatgcccgacggcgaggatctcgtcgtgacccatggcgatgcctgcttgccgaatatcatggtggaaaatggccgcttttctggattcatcgactgtggccggctgggtgtggcggaccgctatcaggacatagcgttggctacccgtgatattgctgaagagcttggcggcgaatgggctgaccgcttcctcgtgctttacggtatcgccgctcccgattcgcagcgcatcgccttctatcgccttcttgacgagttcttctgagcgggactctggggttcgaaatgaccgaccaagcgacgcccaacctgccatcacgagatttcgattccaccgccgccttctatgaaaggttgggcttcggaatcgttttccgggacgccggctggatgatcctccagcgcggggatctcatgctggagttcttcgcccaccccaacttgtttattgcagcttataatggttacaaataaagcaatagcatcacaaatttcacaaataaagcatttttttcactgcattctagttgtggtttgtccaaactcatcaatgtatcttatcatgtctgtataccgtcgacctctagctagagcttggcgtaatcatggtcatagctgtttcctgtgtgaaattgttatccgctcacaattccacacaacatacgagccggaagcataaagtgtaaagcctggggtgcctaatgagtgagctaactcacattaattgcgttgcgctcactgcccgctttccagtcgggaaacctgtcgtgccagctgcattaatgaatcggccaacgcgcggggagaggcggtttgcgtattgggcgctcttccgcttcctcgctcactgactcgctgcgctcggtcgttcggctgcggcgagcggtatcagctcactcaaaggcggtaatacggttatccacagaatcaggggataacgcaggaaagaacatgtgagcaaaaggccagcaaaaggccaggaaccgtaaaaaggccgcgttgctggcgtttttccataggctccgcccccctgacgagcatcacaaaaatcgacgctcaagtcagaggtggcgaaacccgacaggactataaagataccaggcgtttccccctggaagctccctcgtgcgctctcctgttccgaccctgccgcttaccggatacctgtccgcctttctcccttcgggaagcgtggcgctttctcatagctcacgctgtaggtatctcagttcggtgtaggtcgttcgctccaagctgggctgtgtgcacgaaccccccgttcagcccgaccgctgcgccttatccggtaactatcgtcttgagtccaacccggtaagacacgacttatcgccactggcagcagccactggtaacaggattagcagagcgaggtatgtaggcggtgctacagagttcttgaagtggtggcctaactacggctacactagaagaacagtatttggtatctgcgctctgctgaagccagttaccttcggaaaaagagttggtagctcttgatccggcaaacaaaccaccgctggtagcggtggtttttttgtttgcaagcagcagattacgcgcagaaaaaaaggatctcaagaagatcctttgatcttttctacggggtctgacgctcagtggaacgaaaactcacgttaagggattttggtcatgagattatcaaaaaggatcttcacctagatccttttaaattaaaaatgaagttttaaatcaatctaaagtatatatgagtaaacttggtctgacagttaccaatgcttaatcagtgaggcacctatctcagcgatctgtctatttcgttcatccatagttgcctgactccccgtcgtgtagataactacgatacgggagggcttaccatctggccccagtgctgcaatgataccgcgagacccacgctcaccggctccagatttatcagcaataaaccagccagccggaagggccgagcgcagaagtggtcctgcaactttatccgcctccatccagtctattaattgttgccgggaagctagagtaagtagttcgccagttaatagtttgcgcaacgttgttgccattgctacaggcatcgtggtgtcacgctcgtcgtttggtatggcttcattcagctccggttcccaacgatcaaggcgagttacatgatcccccatgttgtgcaaaaaagcggttagctccttcggtcctccgatcgttgtcagaagtaagttggccgcagtgttatcactcatggttatggcagcactgcataattctcttactgtcatgccatccgtaagatgcttttctgtgactggtgagtactcaaccaagtcattctgagaatagtgtatgcggcgaccgagttgctcttgcccggcgtcaatacgggataataccgcgccacatagcagaactttaaaagtgctcatcattggaaaacgttcttcggggcgaaaactctcaaggatcttaccgctgttgagatccagttcgatgtaacccactcgtgcacccaactgatcttcagcatcttttactttcaccagcgtttctgggtgagcaaaaacaggaaggcaaaatgccgcaaaaaagggaataagggcgacacggaaatgttgaatactcatactcttcctttttcaatattattgaagcatttatcagggttattgtctcatgagcggatacatatttgaatgtatttagaaaaataaacaaataggggttccgcgcacatttccccgaaaagtgccacctgacgtc

SEQ ID NO: 64 - DNA, 9123 bp, synthetic construct
  misc_feature 1..9123: note = pVP30 pcDNA3.1 Indian B.1.617 Del-19
  source 1..9123: mol_type = other DNA
gacggatcgggagatctcccgatcccctatggtgcactctcagtacaatctgctctgatgccgcatagttaagccagtatctgctccctgcttgtgtgttggaggtcgctgagtagtgcgcgagcaaaatttaagctacaacaaggcaaggcttgaccgacaattgcatgaagaatctgcttagggttaggcgttttgcgctgcttcgcgatgtacgggccagatatacgcgttgacattgattattgactagttattaatagtaatcaattacggggtcattagttcatagcccatatatggagttccgcgttacataacttacggtaaatggcccgcctggctgaccgcccaacgacccccgcccattgacgtcaataatgacgtatgttcccatagtaacgccaatagggactttccattgacgtcaatgggtggagtatttacggtaaactgcccacttggcagtacatcaagtgtatcatatgccaagtacgccccctattgacgtcaatgacggtaaatggcccgcctggcattatgcccagtacatgaccttatgggactttcctacttggcagtacatctacgtattagtcatcgctattaccatggtgatgcggttttggcagtacatcaatgggcgtggatagcggtttgactcacggggatttccaagtctccaccccattgacgtcaatgggagtttgttttggcaccaaaatcaacgggactttccaaaatgtcgtaacaactccgccccattgacgcaaatgggcggtaggcgtgtacggtgggaggtctatataagcagagctctctggctaactagagaacccactgcttactggcttatcgaaattaatacgactcactatagggagacccaagctggctagccaccatgtttgtgttcctggtgctgctgccactggtgtccagccagtgtgtgaacctgaccaccaggacccaacttcctcctgcctacaccaactccttcaccaggggagtctactaccctgacaaggtgttcaggtcctctgtgctgcacagcacccaggacctgttcctgccattcttcagcaatgtgacctggttccatgccatccatgtgtctggcaccaatggcaccaagaggtttgacaaccctgtgctgccattcaatgatggagtctactttgccagcacagagaagagcaacatcatcaggggctggatttttggcaccaccctggacagcaagacccagtccctgctgattgtgaacaatgccaccaatgtggtgattaaggtgtgtgagttccagttctgtaatgacccattcctggacgtctactaccacaagaacaacaagtcctggatgaagtctgagttcagggtctactcctctgccaacaactgtacctttgaatatgtgagccaaccattcctgatggacttggagggcaagcagggcaacttcaagaacctgagggagtttgtgttcaagaacattgatggctacttcaagatttacagcaaacacacaccaatcaacctggtgagggacctgccacagggcttctctgccttggaaccactggtggacctgccaattggcatcaacatcaccaggttccagaccctgctggctctgcacaggtcctacctgacacctggagactcctcctctggctggacagcaggagcagcagcctactatgtgggctacctccaaccaaggaccttcctgctgaaatacaatgagaatggcaccatcacagatgctgtggactgtgccctggacccactgtctgagaccaagtgtaccctgaaatccttcacagtggagaagggcatctaccagaccagcaacttcagggtccaaccaacagagagcattgtgaggtttccaaacatcaccaacctgtgtccatttggagaggtgttcaatgccaccaggtttgcctctgtctatgcctggaacaggaagaggattagcaactgtgtggctgactactctgtgctctacaactctgcctccttcagcaccttcaagtgttatggagtgagcccaaccaaactgaatgacctgtgtttcaccaatgtctatgctgactcctttgtgattaggggagatgaggtgagacagattgcccctggacaaacaggcaagattgctgactacaactacaaactgcctgatgacttcacaggctgtgtgattgcctggaacagcaacaacctggacagcaaggtgggaggcaactacaactacaggtacagactgttcaggaagagcaacctgaaaccatttgagagggacatcagcacagagatttaccaggctggcagcacaccatgtaatggagtgcagggcttcaactgttactttccactccaatcctatggcttccaaccaaccaatggagtgggctaccaaccatacagggtggtggtgctgtcctttgaactgctccatgcccctgccacagtgtgtggaccaaagaagagcaccaacctggtgaagaacaagtgtgtgaacttcaacttcaatggactgacaggcacaggagtgctgacagagagcaacaagaagttcctgccattccaacagtttggcagggacattgctgacaccacagatgctgtgagggacccacagaccttggagattctggacatcacaccatgttcctttggaggagtgtctgtgattacacctggcaccaacaccagcaaccaggtggctgtgctctaccagggagtgaactgtactgaggtgcctgtggctatccatgctgaccaacttacaccaacctggagggtctacagcacaggcagcaatgtgttccagaccagggctggctgtctgattggagcagagcatgtgaacaactcctatgagtgtgacatcccaattggagcaggcatctgtgcctcctaccagacccagaccaacagcaggaggagggcaaggtctgtggcaagccagagcatcattgcctacacaatgagtctgggagcagagaactctgtggcttacagcaacaacagcattgccatcccaaccaacttcaccatctctgtgaccacagagattctgcctgtgagtatgaccaagacctctgtggactgtacaatgtatatctgtggagacagcacagagtgtagcaacctgctgctccaatatggctccttctgtacccaacttaacagggctctgacaggcattgctgtggaacaggacaagaacacccaggaggtgtttgcccaggtgaagcagatttacaagacacctccaatcaaggactttggaggcttcaacttcagccagattctgcctgacccaagcaagccaagcaagaggtccttcattgaggacctgctgttcaacaaggtgaccctggctgatgctggcttcatcaagcaatatggagactgtctgggagacattgctgccagggacctgatttgtgcccagaagttcaatggactgacagtgctgcctccactgctgacagatgagatgattgcccaatacacctctgccctgctggctggcaccatcacctctggctggacctttggagcaggagcagccctccaaatcccatttgctatgcagatggcttacaggttcaatggcattggagtgacccagaatgtgctctatgagaaccagaaactgattgccaaccagttcaactctgccattggcaagattcaggactccctgtccagcacagcctctgccctgggcaaactccaagatgtggtgaaccagaatgcccaggctctgaacaccctggtgaagcaactttccagcaactttggagccatctcctctgtgctgaatgacatcctgagcagactggacaaggtggaggctgaggtccagattgacagactgattacaggcagactccaatccctccaaacctatgtgacccaacaacttatcagggctgctgagattagggcatctgccaacctggctgccaccaagatgagtgagtgtgtgctgggacaaagcaagagggtggacttctgtggcaagggctaccacctgatgagttttccacagtctgcccctcatggagtggtgttcctgcatgtgacctatgtgcctgcccatgagaagaacttcaccacagcccctgccatctgccatgatggcaaggctcactttccaagggagggagtgtttgtgagcaatggcacccactggtttgtgacccagaggaacttctatgaaccacagattatcaccacagacaacacctttgtgtctggcaactgtgatgtggtgattggcattgtgaacaacacagtctatgacccactccaacctgaactggactccttcaaggaggaactggacaaatacttcaagaaccacaccagccctgatgtggacctgggagacatctctggcatcaatgcctctgtggtgaacatccagaaggagattgacagactgaatgaggtggctaagaacctgaatgagtccctgattgacctccaagaactgggcaaatatgaacaatacatcaagtggccatggtacatctggctgggcttcattgctggactgattgccattgtgatggtgaccataatgctgtgttgtatgacctcctgttgttcctgtctgaaaggctgttgttcctgtggctcctgttgttgaggatccgagctcggtaccaagcttaagtttaaaccgctgatcagcctcgactgtgccttctagttgccagccatctgttgtttgcccctcccccgtgccttccttgaccctggaaggtgccactcccactgtcctttcctaataaaatgaggaaattgcatcgcattgtctgagtaggtgtcattctattctggggggtggggtggggcaggacagcaagggggaggattgggaagacaatagcaggcatgctggggatgcggtgggctctatggcttctgaggcggaaagaaccagctggggctctagggggtatccccacgcgccctgtagcggcgcattaagcgcggcgggtgtggtggttacgcgcagcgtgaccgctacacttgccagcgccctagcgcccgctcctttcgctttcttcccttcctttctcgccacgttcgccggctttccccgtcaagctctaaatcgggggctccctttagggttccgatttagtgctttacggcacctcgaccccaaaaaacttgattagggtgatggttcacgtagtgggccatcgccctgatagacggtttttcgccctttgacgttggagtccacgttctttaatagtggactcttgttccaaactggaacaacactcaaccctatctcggtctattcttttgatttataagggattttgccgatttcggcctattggttaaaaaatgagctgatttaacaaaaatttaacgcgaattaattctgtggaatgtgtgtcagttagggtgtggaaagtccccaggctccccagcaggcagaagtatgcaaagcatgcatctcaattagtcagcaaccaggtgtggaaagtccccaggctccccagcaggcagaagtatgcaaagcatgcatctcaattagtcagcaaccatagtcccgcccctaactccgcccatcccgcccctaactccgcccagttccgcccattctccgccccatggctgactaattttttttatttatgcagaggccgaggccgcctctgcctctgagctattccagaagtagtgaggaggcttttttggaggcctaggcttttgcaaaaagctcccgggagcttgtatatccattttcggatctgatcaagagacaggatgaggatcgtttcgcatgattgaacaagatggattgcacgcaggttctccggccgcttgggtggagaggctattcggctatgactgggcacaacagacaatcggctgctctgatgccgccgtgttccggctgtcagcgcaggggcgcccggttctttttgtcaagaccgacctgtccggtgccctgaatgaactgcaggacgaggcagcgcggctatcgtggctggccacgacgggcgttccttgcgcagctgtgctcgacgttgtcactgaagcgggaagggactggctgctattgggcgaagtgccggggcaggatctcctgtcatctcaccttgctcctgccgagaaagtatccatcatggctgatgcaatgcggcggctgcatacgcttgatccggctacctgcccattcgaccaccaagcgaaacatcgcatcgagcgagcacgtactcggatggaagccggtcttgtcgatcaggatgatctggacgaagagcatcaggggctcgcgccagccgaactgttcgccaggctcaaggcgcgcatgcccgacggcgaggatctcgtcgtgacccatggcgatgcctgcttgccgaatatcatggtggaaaatggccgcttttctggattcatcgactgtggccggctgggtgtggcggaccgctatcaggacatagcgttggctacccgtgatattgctgaagagcttggcggcgaatgggctgaccgcttcctcgtgctttacggtatcgccgctcccgattcgcagcgcatcgccttctatcgccttcttgacgagttcttctgagcgggactctggggttcgaaatgaccgaccaagcgacgcccaacctgccatcacgagatttcgattccaccgccgccttctatgaaaggttgggcttcggaatcgttttccgggacgccggctggatgatcctccagcgcggggatctcatgctggagttcttcgcccaccccaacttgtttattgcagcttataatggttacaaataaagcaatagcatcacaaatttcacaaataaagcatttttttcactgcattctagttgtggtttgtccaaactcatcaatgtatcttatcatgtctgtataccgtcgacctctagctagagcttggcgtaatcatggtcatagctgtttcctgtgtgaaattgttatccgctcacaattccacacaacatacgagccggaagcataaagtgtaaagcctggggtgcctaatgagtgagctaactcacattaattgcgttgcgctcactgcccgctttccagtcgggaaacctgtcgtgccagctgcattaatgaatcggccaacgcgcggggagaggcggtttgcgtattgggcgctcttccgcttcctcgctcactgactcgctgcgctcggtcgttcggctgcggcgagcggtatcagctcactcaaaggcggtaatacggttatccacagaatcaggggataacgcaggaaagaacatgtgagcaaaaggccagcaaaaggccaggaaccgtaaaaaggccgcgttgctggcgtttttccataggctccgcccccctgacgagcatcacaaaaatcgacgctcaagtcagaggtggcgaaacccgacaggactataaagataccaggcgtttccccctggaagctccctcgtgcgctctcctgttccgaccctgccgcttaccggatacctgtccgcctttctcccttcgggaagcgtggcgctttctcatagctcacgctgtaggtatctcagttcggtgtaggtcgttcgctccaagctgggctgtgtgcacgaaccccccgttcagcccgaccgctgcgccttatccggtaactatcgtcttgagtccaacccggtaagacacgacttatcgccactggcagcagccactggtaacaggattagcagagcgaggtatgtaggcggtgctacagagttcttgaagtggtggcctaactacggctacactagaagaacagtatttggtatctgcgctctgctgaagccagttaccttcggaaaaagagttggtagctcttgatccggcaaacaaaccaccgctggtagcggtggtttttttgtttgcaagcagcagattacgcgcagaaaaaaaggatctcaagaagatcctttgatcttttctacggggtctgacgctcagtggaacgaaaactcacgttaagggattttggtcatgagattatcaaaaaggatcttcacctagatccttttaaattaaaaatgaagttttaaatcaatctaaagtatatatgagtaaacttggtctgacagttaccaatgcttaatcagtgaggcacctatctcagcgatctgtctatttcgttcatccatagttgcctgactccccgtcgtgtagataactacgatacgggagggcttaccatctggccccagtgctgcaatgataccgcgagacccacgctcaccggctccagatttatcagcaataaaccagccagccggaagggccgagcgcagaagtggtcctgcaactttatccgcctccatccagtctattaattgttgccgggaagctagagtaagtagttcgccagttaatagtttgcgcaacgttgttgccattgctacaggcatcgtggtgtcacgctcgtcgtttggtatggcttcattcagctccggttcccaacgatcaaggcgagttacatgatcccccatgttgtgcaaaaaagcggttagctccttcggtcctccgatcgttgtcagaagtaagttggccgcagtgttatcactcatggttatggcagcactgcataattctcttactgtcatgccatccgtaagatgcttttctgtgactggtgagtactcaaccaagtcattctgagaatagtgtatgcggcgaccgagttgctcttgcccggcgtcaatacgggataataccgcgccacatagcagaactttaaaagtgctcatcattggaaaacgttcttcggggcgaaaactctcaaggatcttaccgctgttgagatccagttcgatgtaacccactcgtgcacccaactgatcttcagcatcttttactttcaccagcgtttctgggtgagcaaaaacaggaaggcaaaatgccgcaaaaaagggaataagggcgacacggaaatgttgaatactcatactcttcctttttcaatattattgaagcatttatcagggttattgtctcatgagcggatacatatttgaatgtatttagaaaaataaacaaataggggttccgcgcacatttccccgaaaagtgccacctgacgtc

SEQ ID NO: 65 - protein, 1273 aa, synthetic construct; identical to SEQ ID NO: 5
  REGION 1..1273: note = SA Hexapro Spike

SEQ ID NO: 66 - protein, 1273 aa, synthetic construct
  REGION 1..1273: note = Indian B.1.617 Spike
MFVFLVLLPLVSSQCVNLTTRTQLPPAYTNSFTRGVYYPDKVFRSSVLHSTQDLFLPFFSNVTWFHAIHVSGTNGTKRFDNPVLPFNDGVYFASTEKSNIIRGWIFGTTLDSKTQSLLIVNNATNVVIKVCEFQFCNDPFLDVYYHKNNKSWMKSEFRVYSSANNCTFEYVSQPFLMDLEGKQGNFKNLREFVFKNIDGYFKIYSKHTPINLVRDLPQGFSALEPLVDLPIGINITRFQTLLALHRSYLTPGDSSSGWTAGAAAYYVGYLQPRTFLLKYNENGTITDAVDCALDPLSETKCTLKSFTVEKGIYQTSNFRVQPTESIVRFPNITNLCPFGEVFNATRFASVYAWNRKRISNCVADYSVLYNSASFSTFKCYGVSPTKLNDLCFTNVYADSFVIRGDEVRQIAPGQTGKIADYNYKLPDDFTGCVIAWNSNNLDSKVGGNYNYRYRLFRKSNLKPFERDISTEIYQAGSTPCNGVQGFNCYFPLQSYGFQPTNGVGYQPYRVVVLSFELLHAPATVCGPKKSTNLVKNKCVNFNFNGLTGTGVLTESNKKFLPFQQFGRDIADTTDAVRDPQTLEILDITPCSFGGVSVITPGTNTSNQVAVLYQGVNCTEVPVAIHADQLTPTWRVYSTGSNVFQTRAGCLIGAEHVNNSYECDIPIGAGICASYQTQTNSRRRARSVASQSIIAYTMSLGAENSVAYSNNSIAIPTNFTISVTTEILPVSMTKTSVDCTMYICGDSTECSNLLLQYGSFCTQLNRALTGIAVEQDKNTQEVFAQVKQIYKTPPIKDFGGFNFSQILPDPSKPSKRSFIEDLLFNKVTLADAGFIKQYGDCLGDIAARDLICAQKFNGLTVLPPLLTDEMIAQYTSALLAGTITSGWTFGAGAALQIPFAMQMAYRFNGIGVTQNVLYENQKLIANQFNSAIGKIQDSLSSTASALGKLQDVVNQNAQALNTLVKQLSSNFGAISSVLNDILSRLDKVEAEVQIDRLITGRLQSLQTYVTQQLIRAAEIRASANLAATKMSECVLGQSKRVDFCGKGYHLMSFPQSAPHGVVFLHVTYVPAHEKNFTTAPAICHDGKAHFPREGVFVSNGTHWFVTQRNFYEPQIITTDNTFVSGNCDVVIGIVNNTVYDPLQPELDSFKEELDKYFKNHTSPDVDLGDISGINASVVNIQKEIDRLNEVAKNLNESLIDLQELGKYEQYIKWPWYIWLGFIAGLIAIVMVTIMLCCMTSCCSCLKGCCSCGSCCKFDEDDSEPVLKGVKLHYT

SEQ ID NO: 67 - protein, 1273 aa, synthetic construct; identical to SEQ ID NO: 6
  REGION 1..1273: note = Indian B.1.617 Spike Hexapro

SEQ ID NO: 68 - protein, 1254 aa, synthetic construct
  REGION 1..1254: note = Indian B.1.617 Spike Del19
MFVFLVLLPLVSSQCVNLTTRTQLPPAYTNSFTRGVYYPDKVFRSSVLHSTQDLFLPFFSNVTWFHAIHVSGTNGTKRFDNPVLPFNDGVYFASTEKSNIIRGWIFGTTLDSKTQSLLIVNNATNVVIKVCEFQFCNDPFLDVYYHKNNKSWMKSEFRVYSSANNCTFEYVSQPFLMDLEGKQGNFKNLREFVFKNIDGYFKIYSKHTPINLVRDLPQGFSALEPLVDLPIGINITRFQTLLALHRSYLTPGDSSSGWTAGAAAYYVGYLQPRTFLLKYNENGTITDAVDCALDPLSETKCTLKSFTVEKGIYQTSNFRVQPTESIVRFPNITNLCPFGEVFNATRFASVYAWNRKRISNCVADYSVLYNSASFSTFKCYGVSPTKLNDLCFTNVYADSFVIRGDEVRQIAPGQTGKIADYNYKLPDDFTGCVIAWNSNNLDSKVGGNYNYRYRLFRKSNLKPFERDISTEIYQAGSTPCNGVQGFNCYFPLQSYGFQPTNGVGYQPYRVVVLSFELLHAPATVCGPKKSTNLVKNKCVNFNFNGLTGTGVLTESNKKFLPFQQFGRDIADTTDAVRDPQTLEILDITPCSFGGVSVITPGTNTSNQVAVLYQGVNCTEVPVAIHADQLTPTWRVYSTGSNVFQTRAGCLIGAEHVNNSYECDIPIGAGICASYQTQTNSRRRARSVASQSIIAYTMSLGAENSVAYSNNSIAIPTNFTISVTTEILPVSMTKTSVDCTMYICGDSTECSNLLLQYGSFCTQLNRALTGIAVEQDKNTQEVFAQVKQIYKTPPIKDFGGFNFSQILPDPSKPSKRSFIEDLLFNKVTLADAGFIKQYGDCLGDIAARDLICAQKFNGLTVLPPLLTDEMIAQYTSALLAGTITSGWTFGAGAALQIPFAMQMAYRFNGIGVTQNVLYENQKLIANQFNSAIGKIQDSLSSTASALGKLQDVVNQNAQALNTLVKQLSSNFGAISSVLNDILSRLDKVEAEVQIDRLITGRLQSLQTYVTQQLIRAAEIRASANLAATKMSECVLGQSKRVDFCGKGYHLMSFPQSAPHGVVFLHVTYVPAHEKNFTTAPAICHDGKAHFPREGVFVSNGTHWFVTQRNFYEPQIITTDNTFVSGNCDVVIGIVNNTVYDPLQPELDSFKEELDKYFKNHTSPDVDLGDISGINASVVNIQKEIDRLNEVAKNLNESLIDLQELGKYEQYIKWPWYIWLGFIAGLIAIVMVTIMLCCMTSCCSCLKGCCSCGSCC

SEQ ID NO: 69 - protein, 1273 aa, synthetic construct; identical to SEQ ID NO: 53
  REGION 1..1273: note = Spike Hexapro

SEQ ID NO: 70 - DNA, 8319 bp, synthetic construct
  misc_feature 1..8319: note = pAZ50-SARS-CoV-2 HexaPro-FlS-a
  source 1..8319: mol_type = other DNA
gtcgacattgattattgactagttattaatagtaatcaattacggggtcattagttcatagcccatatatggagttccgcgttacataacttacggtaaatggcccgcctggctgaccgcccaacgacccccgcccattgacgtcaataatgacgtatgttcccatagtaacgccaatagggactttccattgacgtcaatgggtggactatttacggtaaactgcccacttggcagtacatcaagtgtatcatatgccaagtacgccccctattgacgtcaatgacggtaaatggcccgcctggcattatgcccagtacatgaccttatgggactttcctacttggcagtacatctacgtattagtcatcgctattaccatgggtcgaggtgagccccacgttctgcttcactctccccatctcccccccctccccacccccaattttgtatttatttattttttaattattttgtgcagcgatgggggcggggggggggggggcgcgcgccaggcggggcggggcggggcgaggggcggggcggggcgaggcggagaggtgcggcggcagccaatcagagcggcgcgctccgaaagtttccttttatggcgaggcggcggcggcggcggccctataaaaagcgaagcgcgcggcgggcgggagtcgctgcgttgccttcgccccgtgccccgctccgcgccgcctcgcgccgcccgccccggctctgactgaccgcgttactcccacaggtgagcgggcgggacggcccttctcctccgggctgtaattagcgcttggtttaatgacggctcgtttcttttctgtggctgcgtgaaagccttaaagggctccgggagggccctttgtgcgggggggagcggctcggggggtgcgtgcgtgtgtgtgtgcgtggggagcgccgcgtgcggcccgcgctgcccggcggctgtgagcgctgcgggcgcggcgcggggctttgtgcgctccgcgtgtgcgcgaggggagcgcggccgggggcggtgccccgcggtgcgggggggctgcgaggggaacaaaggctgcgtgcggggtgtgtgcgtgggggggtgagcagggggtgtgggcgcggcggtcgggctgtaacccccccctgcacccccctccccgagttgctgagcacggcccggcttcgggtgcggggctccgtgcggggcgtggcgcggggctcgccgtgccgggcggggggtggcggcaggtgggggtgccgggcggggcggggccgcctcgggccggggagggctcgggggaggggcgcggcggcccccggagcgccggcggctgtcgaggcgcggcgagccgcagccattgccttttatggtaatcgtgcgagagggcgcagggacttcctttgtcccaaatctgtgcggagccgaaatctgggaggcgccgccgcaccccctctagcgggcgcggggcgaagcggtgcggcgccggcaggaaggaaatgggcggggagggccttcgtgcgtcgccgcgccgccgtccccttctccctctccagcctcggggctgtccgcggggggacggctgccttcgggggggacggggcagggcggggttcggcttctggcgtgtgaccggcggctctagcgcctctgctaaccatgttcatgccttcttctttttcctacagctcctgggcaacgtgctggttgttgtgctgtctcatcattttggcaaagaattgcggccgtctcaggccgagttcggtaccgccaccatgttcgtgttcctggtgctcctgcctctggtgagcagccagtgcgtgaacctgaccacccgaacccagctcccaccagcctacaccaacagctttacacggggcgtgtactaccctgacaaggtgttcagatctagcgtcctgcacagcactcaggacctcttcctgccgttcttcagcaacgtgacatggttccacgccatccacgtgagcggcacaaacggaaccaagcggtttgataaccccgtcctgccattcaatgatggagtttacttcgccagtaccgagaagagtaacatcatccggggctggatcttcggcaccaccctggatagcaaaacacagagcctcctgatcgtgaacaatgccacgaacgtcgtgatcaaggtgtgcgagttccagttttgcaatgatcctttcctgggtgtgtactaccacaagaacaacaagagctggatggaaagcgagttcagagtctacagcagcgccaacaactgcacattcgagtacgtctctcagccttttctgatggaccttgaggggaaacaaggcaacttcaagaacctgagagaattcgtgttcaagaacatcgacggctacttcaaaatctactccaagcacacacccatcaacctggtccgggacctccctcagggcttcagcgccctggaacccctggtcgacctgcccataggcatcaacataacgcggttccaaaccctgctggccctgcatagatcctacctgactcctggcgacagcagcagcggatggaccgccggagctgcagcctactatgtgggctacctgcaacctagaaccttcctgctgaagtacaacgagaacggcacaatcacagacgccgtcgactgcgccctggaccctctctctgagacaaagtgcaccctgaagtccttcaccgtggaaaagggcatctaccagaccagcaacttccgggtgcagcctacagagagcatcgtgcgatttccaaacattaccaacctctgccccttcggcgaggtgtttaacgccacaagatttgcctccgtttacgcctggaatagaaagagaatcagcaattgtgtggccgactactccgtgctgtataacagcgcctctttcagcaccttcaagtgctacggcgtttccccaacaaagctgaatgacctgtgcttcaccaacgtgtacgccgactccttcgtaattagaggcgatgaggtgcggcagatcgcaccaggccagaccggtaagatcgctgactacaactataagctgcctgatgattttacaggctgcgtgatcgcctggaactctaacaacctggatagcaaggtgggcggcaactacaactacctgtaccggctgtttcgcaagtctaacctgaaacctttcgagagagacatctccacagagatctaccaggccggttctacaccttgtaacggggtggaaggcttcaactgttacttccctctgcaaagctacggcttccagcctaccaatggagtcggctaccagccataccgggtggtcgtgctgtccttcgagttactccacgcccccgccaccgtctgcggtcctaagaagtccaccaatctggttaagaacaaatgcgtgaacttcaacttcaacggcctgaccgggaccggcgtgctgaccgaaagcaacaaaaagttcctccccttccagcagttcggccgtgatatcgctgacaccacagatgccgtcagagatccacagaccctggaaatcctggatattacaccctgctccttcggaggagtttctgtgatcacccccgggaccaataccagcaaccaggtggctgtgctgtaccaagatgttaactgcaccgaggttcctgtggccatccacgccgatcagctgacacctacttggagagtgtactccactggctccaatgtgttccagaccagggccggatgtctgatcggcgccgagcacgtgaataacagttacgagtgcgacatccctatcggcgccggcatctgtgccagctaccagacccagacaaacagccctgggtctgcttcctctgtagctagccagagcatcatcgcctacaccatgagcctgggcgcagagaacagcgtggcctattccaacaactctatcgccattcccaccaactttacaattagcgtcacaacagagatcctgcccgtgagcatgaccaagaccagcgtggactgtacaatgtacatctgtggcgacagcactgaatgcagcaacctgctgctgcaatacggctccttttgcacccaactgaaccgggcgctgaccggaatcgccgtggaacaggacaaaaatacccaggaggtgttcgcccaagtgaagcagatctacaagaccccacctatcaaggacttcggcggctttaactttagccagattctccctgatccttctaagcctagcaagcggagccctatcgaggatctgctgttcaacaaggtcaccctggccgatgccggctttatcaaacagtatggcgattgcctgggcgacatagccgccagagatctgatctgcgcccagaaattcaacggcctgacagttctcccacctctgctgaccgacgagatgatcgctcagtacacctctgccctgctggctggcaccatcacatctgggtggacatttggcgccggccccgccctgcagatcccctttcccatgcagatggcctatagattcaacggaatcggcgtgacccagaacgtgctgtatgaaaaccagaagctgatcgctaaccagttcaattctgccatcggcaagatccaggactccctctcctctacccccagcgccctgggcaaactgcaggacgtggtgaatcagaacgcccaagccctgaacaccctggtgaagcagctcagcagcaattttggcgccatcagctctgtgctgaacgatatcctgtctagactggaccctccagaagccgaagtccagatcgatagactgatcacaggcagactgcagtccctgcaaacctacgtgacccaacagctgatcagggccgctgaaataagagccagcgccaatctcgccgctaccaagatgtccgagtgtgtgctgggacagtctaaacgcgttgacttctgcggcaaaggctatcacctgatgagcttcccccagagcgcgccgcacggcgtggtgttcctgcatgtgacatacgtgcctgcccaagagaagaatttcacaaccgcccctgccatctgccacgacggcaaggcccacttcccaagagagggcgttttcgtttccaatggcacacactggttcgtgacacaaagaaacttctacgaaccccagattatcaccaccgacaacaccttcgtgagtggcaattgtgacgtggtcatcggaatcgtgaacaacacagtgtacgaccctctgcaacctgagctggactcttttaaggaagagctggacaagtactttaaaaaccacaccagccccgatgtggacctgggcgacatcagtggcattaacgccagcgtggtgaacatccaaaaggaaatcgacagactgaacgaggtggccaagaacctgaacgagtccctgatcgacctgcaggagctcggcaaatacgagcagtacatcaagtggccatggtacatctggctgggcttcattgctggactgattgccattgtgatggtgaccataatgctgtgttgtatgacctcctgttgttcctgtctgaaaggctgttgttcctgtggctcctgttgtaagtttgatgaggatgactctgaacctgtgctgaaaggagtgaaactgcactacacctgactcgagcgataattcactcctcaggtgcaggctgcctatcagaaggtggtggctggtgtggccaatgccctggctcacaaataccactgagatctttttccctctgccaaaaattatggggacatcatgaagccccttgagcatctgacttctggctaataaaggaaatttattttcattgcaatagtgtgttggaattttttgtgtctctcactcggaaggacatatgggagggcaaatcatttaaaacatcagaatgagtatttggtttagagtttggcaacatatgccatatgctggctgccatgaacaaaggtggctataaagaggtcatcagtatatgaaacagccccctgctgtccattccttattccatagaaaagccttgacttgaggttagattttttttatattttgttttgtgttatttttttctttaacatccctaaaattttccttacatgttttactagccagatttttcctcctctcctgactactcccagtcatagctgtccctcttctcttatgaagatccctcgacctgcagcccaagcttggcgtaatcatggtcatagctgtttcctgtgtgaaattgttatccgctcacaattccacacaacatacgagccggaagcataaagtgtaaagcctggggtgcctaatgagtgagctaactcacattaattgcgttgcgctcactgcccgctttccagtcgggaaacctgtcgtgccagcggatcgatccgctgcattaatgaatcggccaacgcgcggggagaggcggtttgcgtattgggcgctcttccgcttcctcgctcactgactcgctgcgctcggtcgttcggctgcggcgagcggtatcagctcactcaaaggcggtaatacggttatccacagaatcaggggataacgcaggaaagaacatgtgagcaaaaggccagcaaaaggccaggaaccgtaaaaaggccgcgttgctggcgtttttccataggctccgcccccctgacgagcatcacaaaaatcgacgctcaagtcagaggtggcgaaacccgacaggactataaagataccaggcgtttccccctggaagctccctcgtgcgctctcctgttccgaccctgccgcttaccggatacctgtccgcctttctcccttcgggaagcgtggcgctttctcaatgctcacgctgtaggtatctcagttcggtgtaggtcgttcgctccaagctgggctgtgtgcacgaaccccccgttcagcccgaccgctgcgccttatccggtaactatcgtcttgagtccaacccggtaagacacgacttatcgccactggcagcagccactggtaacaggattagcagagcgaggtatgtaggcggtgctacagagttcttgaagtggtggcctaactacggctacactagaaggacagtatttggtatctgcgctctgctgaagccagttaccttcggaaaaagagttggtagctcttgatccggcaaacaaaccaccgctggtagcggtggtttttttgtttgcaagcagcagattacgcgcagaaaaaaaggatctcaagaagatcctttgatcttttctacggggtctgacgctcagtggaacgaaaactcacgttaagggattttggtcatgagattatcaaaaaggatcttcacctagatccttttaaattaaaaatgaagttttaaatcaatctaaagtatatatgagtaaacttggtctgacagttaccaatgcttaatcagtgaggcacctatctcagcgatctgtctatttcgttcatccatagttgcctgactccccgtcgtgtagataactacgatacgggagggcttaccatctggccccagtgctgcaatgataccgcgagacccacgctcaccggctccagatttatcagcaataaaccagccagccggaagggccgagcgcagaagtggtcctgcaactttatccgcctccatccagtctattaattgttgccgggaagctagagtaagtagttcgccagttaatagtttgcgcaacgttgttgccattgctacaggcatcgtggtgtcacgctcgtcgtttggtatggcttcattcagctccggttcccaacgatcaaggcgagttacatgatcccccatgttgtgcaaaaaagcggttagctccttcggtcctccgatcgttgtcagaagtaagttggccgcagtgttatcactcatggttatggcagcactgcataattctcttactgtcatgccatccgtaagatgcttttctgtgactggtgagtactcaaccaagtcattctgagaatagtgtatgcggcgaccgagttgctcttgcccggcgtcaatacgggataataccgcgccacatagcagaactttaaaagtgctcatcattggaaaacgttcttcggggcgaaaactctcaaggatcttaccgctgttgagatccagttcgatgtaacccactcgtgcacccaactgatcttcagcatcttttactttcaccagcgtttctgggtgagcaaaaacaggaaggcaaaatgccgcaaaaaagggaataagggcgacacggaaatgttgaatactcatactcttcctttttcaatattattgaagcatttatcagggttattgtctcatgagcggatacatatttgaatgtatttagaaaaataaacaaataggggttccgcgcacatttccccgaaaagtgccacctg

SEQ ID NO: 71 - DNA, 9063 bp, synthetic construct
  misc_feature 1..9063: note = pAZ51-SARS-CoV-2 HexaPro(ECD)-HA(TM CT)-2A-M1(H5N1)-a
  source 1..9063: mol_type = other DNA
gtcgacattgattattgactagttattaatagtaatcaattacggggtcattagttcatagcccatatatggagttccgcgttacataacttacggtaaatggcccgcctggctgaccgcccaacgacccccgcccattgacgtcaataatgacgtatgttcccatagtaacgccaatagggactttccattgacgtcaatgggtggactatttacggtaaactgcccacttggcagtacatcaagtgtatcatatgccaagtacgccccctattgacgtcaatgacggtaaatggcccgcctggcattatgcccagtacatgaccttatgggactttcctacttggcagtacatctacgtattagtcatcgctattaccatgggtcgaggtgagccccacgttctgcttcactctccccatctcccccccctccccacccccaattttgtatttatttattttttaattattttgtgcagcgatgggggcggggggggggggggcgcgcgccaggcggggcggggcggggcgaggggcggggcggggcgaggcggagaggtgcggcggcagccaatcagagcggcgcgctccgaaagtttccttttatggcgaggcggcggcggcggcggccctataaaaagcgaagcgcgcggcgggcgggagtcgctgcgttgccttcgccccgtgccccgctccgcgccgcctcgcgccgcccgccccggctctgactgaccgcgttactcccacaggtgagcgggcgggacggcccttctcctccgggctgtaattagcgcttggtttaatgacggctcgtttcttttctgtggctgcgtgaaagccttaaagggctccgggagggccctttgtgcgggggggagcggctcggggggtgcgtgcgtgtgtgtgtgcgtggggagcgccgcgtgcggcccgcgctgcccggcggctgtgagcgctgcgggcgcggcgcggggctttgtgcgctccgcgtgtgcgcgaggggagcgcggccgggggcggtgccccgcggtgcgggggggctgcgaggggaacaaaggctgcgtgcggggtgtgtgcgtgggggggtgagcagggggtgtgggcgcggcggtcgggctgtaacccccccctgcacccccctccccgagttgctgagcacggcccggcttcgggtgcggggctccgtgcggggcgtggcgcggggctcgccgtgccgggcggggggtggcggcaggtgggggtgccgggcggggcggggccgcctcgggccggggagggctcgggggaggggcgcggcggcccccggagcgccggcggctgtcgaggcgcggcgagccgcagccattgccttttatggtaatcgtgcgagagggcgcagggacttcctttgtcccaaatctgtgcggagccgaaatctgggaggcgccgccgcaccccctctagcgggcgcggggcgaagcggtgcggcgccggcaggaaggaaatgggcggggagggccttcgtgcgtcgccgcgccgccgtccccttctccctctccagcctcggggctgtccgcggggggacggctgccttcgggggggacggggcagggcggggttcggcttctggcgtgtgaccggcggctctagcgcctctgctaaccatgttcatgccttcttctttttcctacagctcctgggcaacgtgctggttgttgtgctgtctcatcattttggcaaagaattgcggccgtctcaggccgagttcggtaccgccaccatgttcgtgttcctggtgctcctgcctctggtgagcagccagtgcgtgaacctgaccacccgaacccagctcccaccagcctacaccaacagctttacacggggcgtgtactaccctgacaaggtgttcagatctagcgtcctgcacagcactcaggacctcttcctgccgttcttcagcaacgtgacatggttccacgccatccacgtgagcggcacaaacggaaccaagcggtttgataaccccgtcctgccattcaatgatggagtttacttcgccagtaccgagaagagtaacatcatccggggctggatcttcggcaccaccctggatagcaaaacacagagcctcctgatcgtgaacaatgccacgaacgtcgtgatcaaggtgtgcgagttccagttttgcaatgatcctttcctgggtgtgtactaccacaagaacaacaagagctggatggaaagcgagttcagagtctacagcagcgccaacaactgcacattcgagtacgtctctcagccttttctgatggaccttgaggggaaacaaggcaacttcaagaacctgagagaattcgtgttcaagaacatcgacggctacttcaaaatctactccaagcacacacccatcaacctggtccgggacctccctcagggcttcagcgccctggaacccctggtcgacctgcccataggcatcaacataacgcggttccaaaccctgctggccctgcatagatcctacctgactcctggcgacagcagcagcggatggaccgccggagctgcagcctactatgtgggctacctgcaacctagaaccttcctgctgaagtacaacgagaacggcacaatcacagacgccgtcgactgcgccctggaccctctctctgagacaaagtgcaccctgaagtccttcaccgtggaaaagggcatctaccagaccagcaacttccgggtgcagcctacagagagcatcgtgcgatttccaaacattaccaacctctgccccttcggcgaggtgtttaacgccacaagatttgcctccgtttacgcctggaatagaaagagaatcagcaattgtgtggccgactactccgtgctgtataacagcgcctctttcagcaccttcaagtgctacggcgtttccccaacaaagctgaatgacctgtgcttcaccaacgtgtacgccgactccttcgtaattagaggcgatgaggtgcggcagatcgcaccaggccagaccggtaagatcgctgactacaactataagctgcctgatgattttacaggctgcgtgatcgcctggaactctaacaacctggatagcaaggtgggcggcaactacaactacctgtaccggctgtttcgcaagtctaacctgaaacctttcgagagagacatctccacagagatctaccaggccggttctacaccttgtaacggggtggaaggcttcaactgttacttccctctgcaaagctacggcttccagcctaccaatggagtcggctaccagccataccgggtggtcgtgctgtccttcgagttactccacgcccccgccaccgtctgcggtcctaagaagtccaccaatctggttaagaacaaatgcgtgaacttcaacttcaacggcctgaccgggaccggcgtgctgaccgaaagcaacaaaaagttcctccccttccagcagttcggccgtgatatcgctgacaccacagatgccgtcagagatccacagaccctggaaatcctggatattacaccctgctccttcggaggagtttctgtgatcacccccgggaccaataccagcaaccaggtggctgtgctgtaccaagatgttaactgcaccgaggttcctgtggccatccacgccgatcagctgacacctacttggagagtgtactccactggctccaatgtgttccagaccagggccggatgtctgatcggcgccgagcacgtgaataacagttacgagtgcgacatccctatcggcgccggcatctgtgccagctaccagacccagacaaacagccctgggtctgcttcctctgtagctagccagagcatcatcgcctacaccatgagcctgggcgcagagaacagcgtggcctattccaacaactctatcgccattcccaccaactttacaattagcgtcacaacagagatcctgcccgtgagcatgaccaagaccagcgtggactgtacaatgtacatctgtggcgacagcactgaatgcagcaacctgctgctgcaatacggctccttttgcacccaactgaaccgggcgctgaccggaatcgccgtggaacaggacaaaaatacccaggaggtgttcgcccaagtgaagcagatctacaagaccccacctatcaaggacttcggcggctttaactttagccagattctccctgatccttctaagcctagcaagcggagccctatcgaggatctgctgttcaacaaggtcaccctggccgatgccggctttatcaaacagtatggcgattgcctgggcgacatagccgccagagatctgatctgcgcccagaaattcaacggcctgacagttctcccacctctgctgaccgacgagatgatcgctcagtacacctctgccctgctggctggcaccatcacatctgggtggacatttggcgccggccccgccctgcagatcccctttcccatgcagatggcctatagattcaacggaatcggcgtgacccagaacgtgctgtatgaaaaccagaagctgatcgctaaccagttcaattctgccatcggcaagatccaggactccctctcctctacccccagcgccctgggcaaactgcaggacgtggtgaatcagaacgcccaagccctgaacaccctggtgaagcagctcagcagcaattttggcgccatcagctctgtgctgaacgatatcctgtctagactggaccctccagaagccgaagtccagatcgatagactgatcacaggcagactgcagtccctgcaaacctacgtgacccaacagctgatcagggccgctgaaataagagccagcgccaatctcgccgctaccaagatgtccgagtgtgtgctgggacagtctaaacgcgttgacttctgcggcaaaggctatcacctgatgagcttcccccagagcgcgccgcacggcgtggtgttcctgcatgtgacatacgtgcctgcccaagagaagaatttcacaaccgcccctgccatctgccacgacggcaaggcccacttcccaagagagggcgttttcgtttccaatggcacacactggttcgtgacacaaagaaacttctacgaaccccagattatcaccaccgacaacaccttcgtgagtggcaattgtgacgtggtcatcggaatcgtgaacaacacagtgtacgaccctctgcaacctgagctggactcttttaaggaagagctggacaagtactttaaaaaccacaccagccccgatgtggacctgggcgacatcagtggcattaacgccagcgtggtgaacatccaaaaggaaatcgacagactgaacgaggtggccaagaacctgaacgagtccctgatcgacctgcaggagctcggcaaatacgagcagtacatcaagtggccacaaatactgtcaatttattcaacagtggcgagttccctagcactggcaatcatgatggctggtctatctttatggatgtgctccaatggatcgttacaatgcagaatttgcattgagggcagaggaagtctgctaacatgcggtgacgtcgaggagaatcctggcccaatgagtcttctaaccgaggtcgaaacgtacgttctctctatcatcccgtcaggccccctcaaagccgagatcgcgcagaaacttgaagatgtctttgcaggaaagaacaccgatctcgaggctctcatggagtggctgaagacaagaccaatcctgtcacctctgactaaagggattttgggatttgtattcacgctcaccgtgcccagtgagcgaggactgcagcgtagacgctttgtccagaatgccctaaatggaaatggagatccaaataatatggatagggcagttaagctatataagaagctgaaaagagaaataacattccatggggctaaagaggtttcactcagctactcaaccggtgcacttgccagttgcatgggtctcatatacaacaggatgggaacggtgactacggaagtggcttttggcctagtgtgtgccacttgtgagcagattgcagattcacagcatcggtctcacaggcagatggcaactatcaccaacccactaatcaggcatgaaaacagaatggtgctggccagcactacagctaaggctatggagcagatggcgggatcaagtgagcaggcagcggaagccatggaggtcgctaatcaggctaggcagatggtgcaggcaatgaggacaattggaactcatcctaactctagtgctggtctgagagataatcttcttgaaaatttgcaggcctaccagaaacgaatgggagtgcagatgcagcgattcaagtgactcgagcgataattcactcctcaggtgcaggctgcctatcagaaggtggtggctggtgtggccaatgccctggctcacaaataccactgagatctttttccctctgccaaaaattatggggacatcatgaagccccttgagcatctgacttctggctaataaaggaaatttattttcattgcaatagtgtgttggaattttttgtgtctctcactcggaaggacatatgggagggcaaatcatttaaaacatcagaatgagtatttggtttagagtttggcaacatatgccatatgctggctgccatgaacaaaggtggctataaagaggtcatcagtatatgaaacagccccctgctgtccattccttattccatagaaaagccttgacttgaggttagattttttttatattttgttttgtgttatttttttctttaacatccctaaaattttccttacatgttttactagccagatttttcctcctctcctgactactcccagtcatagctgtccctcttctcttatgaagatccctcgacctgcagcccaagcttggcgtaatcatggtcatagctgtttcctgtgtgaaattgttatccgctcacaattccacacaacatacgagccggaagcataaagtgtaaagcctggggtgcctaatgagtgagctaactcacattaattgcgttgcgctcactgcccgctttccagtcgggaaacctgtcgtgccagcggatcgatccgctgcattaatgaatcggccaacgcgcggggagaggcggtttgcgtattgggcgctcttccgcttcctcgctcactgactcgctgcgctcggtcgttcggctgcggcgagcggtatcagctcactcaaaggcggtaatacggttatccacagaatcaggggataacgcaggaaagaacatgtgagcaaaaggccagcaaaaggccaggaaccgtaaaaaggccgcgttgctggcgtttttccataggctccgcccccctgacgagcatcacaaaaatcgacgctcaagtcagaggtggcgaaacccgacaggactataaagataccaggcgtttccccctggaagctccctcgtgcgctctcctgttccgaccctgccgcttaccggatacctgtccgcctttctcccttcgggaagcgtggcgctttctcaatgctcacgctgtaggtatctcagttcggtgtaggtcgttcgctccaagctgggctgtgtgcacgaaccccccgttcagcccgaccgctgcgccttatccggtaactatcgtcttgagtccaacccggtaagacacgacttatcgccactggcagcagccactggtaacaggattagcagagcgaggtatgtaggcggtgctacagagttcttgaagtggtggcctaactacggctacactagaaggacagtatttggtatctgcgctctgctgaagccagttaccttcggaaaaagagttggtagctcttgatccggcaaacaaaccaccgctggtagcggtggtttttttgtttgcaagcagcagattacgcgcagaaaaaaaggatctcaagaagatcctttgatcttttctacggggtctgacgctcagtggaacgaaaactcacgttaagggattttggtcatgagattatcaaaaaggatcttcacctagatccttttaaattaaaaatgaagttttaaatcaatctaaagtatatatgagtaaacttggtctgacagttaccaatgcttaatcagtgaggcacctatctcagcgatctgtctatttcgttcatccatagttgcctgactccccgtcgtgtagataactacgatacgggagggcttaccatctggccccagtgctgcaatgataccgcgagacccacgctcaccggctccagatttatcagcaataaaccagccagccggaagggccgagcgcagaagtggtcctgcaactttatccgcctccatccagtctattaattgttgccgggaagctagagtaagtagttcgccagttaatagtttgcgcaacgttgttgccattgctacaggcatcgtggtgtcacgctcgtcgtttggtatggcttcattcagctccggttcccaacgatcaaggcgagttacatgatcccccatgttgtgcaaaaaagcggttagctccttcggtcctccgatcgttgtcagaagtaagttggccgcagtgttatcactcatggttatggcagcactgcataattctcttactgtcatgccatccgtaagatgcttttctgtgactggtgagtactcaaccaagtcattctgagaatagtgtatgcggcgaccgagttgctcttgcccggcgtcaatacgggataataccgcgccacatagcagaactttaaaagtgctcatcattggaaaacgttcttcggggcgaaaactctcaaggatcttaccgctgttgagatccagttcgatgtaacccactcgtgcacccaactgatcttcagcatcttttactttcaccagcgtttctgggtgagcaaaaacaggaaggcaaaatgccgcaaaaaagggaataagggcgacacggaaatgttgaatactcatactcttcctttttcaatattattgaagcatttatcagggttattgtctcatgagcggatacatatttgaatgtatttagaaaaataaacaaataggggttccgcgcacatttccccgaaaagtgccacctg

SEQ ID NO: 72 - DNA, 4890 bp, synthetic construct
  misc_feature 1..4890: note = pAZ52-pcDNA3-CMV-mCCL28-a
  source 1..4890: mol_type = other DNA
gtcgacattgattattgactagttattaatagtaatcaattacggggtcattagttcatagcccatatatggagttccgcgttacataacttacggtaaatggcccgcctggctgaccgcccaacgacccccgcccattgacgtcaataatgacgtatgttcccatagtaacgccaatagggactttccattgacgtcaatgggtggactatttacggtaaactgcccacttggcagtacatcaagtgtatcatatgccaagtacgccccctattgacgtcaatgacggtaaatggcccgcctggcattatgcccagtacatgaccttatgggactttcctacttggcagtacatctacgtattagtcatcgctattaccatgggtcgaggtgagccccacgttctgcttcactctccccatctcccccccctccccacccccaattttgtatttatttattttttaattattttgtgcagcgatgggggcggggggggggggggcgcgcgccaggcggggcggggcggggcgaggggcggggcggggcgaggcggagaggtgcggcggcagccaatcagagcggcgcgctccgaaagtttccttttatggcgaggcggcggcggcggcggccctataaaaagcgaagcgcgcggcgggcgggagtcgctgcgttgccttcgccccgtgccccgctccgcgccgcctcgcgccgcccgccccggctctgactgaccgcgttactcccacaggtgagcgggcgggacggcccttctcctccgggctgtaattagcgcttggtttaatgacggctcgtttcttttctgtggctgcgtgaaagccttaaagggctccgggagggccctttgtgcgggggggagcggctcggggggtgcgtgcgtgtgtgtgtgcgtggggagcgccgcgtgcggcccgcgctgcccggcggctgtgagcgctgcgggcgcggcgcggggctttgtgcgctccgcgtgtgcgcgaggggagcgcggccgggggcggtgccccgcggtgcgggggggctgcgaggggaacaaaggctgcgtgcggggtgtgtgcgtgggggggtgagcagggggtgtgggcgcggcggtcgggctgtaacccccccctgcacccccctccccgagttgctgagcacggcccggcttcgggtgcggggctccgtgcggggcgtggcgcggggctcgccgtgccgggcggggggtggcggcaggtgggggtgccgggcggggcggggccgcctcgggccggggagggctcgggggaggggcgcggcggcccccggagcgccggcggctgtcgaggcgcggcgagccgcagccattgccttttatggtaatcgtgcgagagggcgcagggacttcctttgtcccaaatctgtgcggagccgaaatctgggaggcgccgccgcaccccctctagcgggcgcggggcgaagcggtgcggcgccggcaggaaggaaatgggcggggagggccttcgtgcgtcgccgcgccgccgtccccttctccctctccagcctcggggctgtccgcggggggacggctgccttcgggggggacggggcagggcggggttcggcttctggcgtgtgaccggcggctctagcgcctctgctaaccatgttcatgccttcttctttttcctacagctcctgggcaacgtgctggttgttgtgctgtctcatcattttggcaaagaattgcggccgtctcaggccgagttcggtaccgccaccatgcagcaagcagggctcacactcatggctgtggctgtgtgtgtggcttttcaaacctcagaagccatacttcccatggcctccagctgttgcactgaggtgtctcatcatgtttccggaagacttctggaaagagtgagttcatgcagcatccagagagctgacggggactgcgacctggctgctgtcatccttcatgttaaacgtagaagaatctgcatcagcccgcacaatcgtactttgaagcagtggatgagagcctcagaggtaaagaagaatggcagagaaaacgtatgttctgggaaaaaacaacccagcaggaaggacagaaaagggcacactacgagaaagcacagaacacgtggaacacacaggcacgaagcctctcgttagctcgagcgataattcactcctcaggtgcaggctgcctatcagaaggtggtggctggtgtggccaatgccctggctcacaaataccactgagatctttttccctctgccaaaaattatggggacatcatgaagccccttgagcatctgacttctggctaataaaggaaatttattttcattgcaatagtgtgttggaattttttgtgtctctcactcggaaggacatatgggagggcaaatcatttaaaacatcagaatgagtatttggtttagagtttggcaacatatgccatatgctggctgccatgaacaaaggtggctataaagaggtcatcagtatatgaaacagccccctgctgtccattccttattccatagaaaagccttgacttgaggttagattttttttatattttgttttgtgttatttttttctttaacatccctaaaattttccttacatgttttactagccagatttttcctcctctcctgactactcccagtcatagctgtccctcttctcttatgaagatccctcgacctgcagcccaagcttggcgtaatcatggtcatagctgtttcctgtgtgaaattgttatccgctcacaattccacacaacatacgagccggaagcataaagtgtaaagcctggggtgcctaatgagtgagctaactcacattaattgcgttgcgctcactgcccgctttccagtcgggaaacctgtcgtgccagcggatcgatccgctgcattaatgaatcggccaacgcgcggggagaggcggtttgcgtattgggcgctcttccgcttcctcgctcactgactcgctgcgctcggtcgttcggctgcggcgagcggtatcagctcactcaaaggcggtaatacggttatccacagaatcaggggataacgcaggaaagaacatgtgagcaaaaggccagcaaaaggccaggaaccgtaaaaaggccgcgttgctggcgtttttccataggctccgcccccctgacgagcatcacaaaaatcgacgctcaagtcagaggtggcgaaacccgacaggactataaagataccaggcgtttccccctggaagctccctcgtgcgctctcctgttccgaccctgccgcttaccggatacctgtccgcctttctcccttcgggaagcgtggcgctttctcaatgctcacgctgtaggtatctcagttcggtgtaggtcgttcgctccaagctgggctgtgtgcacgaaccccccgttcagcccgaccgctgcgccttatccggtaactatcgtcttgagtccaacccggtaagacacgacttatcgccactggcagcagccactggtaacaggattagcagagcgaggtatgtaggcggtgctacagagttcttgaagtggtggcctaactacggctacactagaaggacagtatttggtatctgcgctctgctgaagccagttaccttcggaaaaagagttggtagctcttgatccggcaaacaaaccaccgctggtagcggtggtttttttgtttgcaagcagcagattacgcgcagaaaaaaaggatctcaagaagatcctttgatcttttctacggggtctgacgctcagtggaacgaaaactcacgttaagggattttggtcatgagattatcaaaaaggatcttcacctagatccttttaaattaaaaatgaagttttaaatcaatctaaagtatatatgagtaaacttggtctgacagttaccaatgcttaatcagtgaggcacctatctcagcgatctgtctatttcgttcatccatagttgcctgactccccgtcgtgtagataactacgatacgggagggcttaccatctggccccagtgctgcaatgataccgcgagacccacgctcaccggctccagatttatcagcaataaaccagccagccggaagggccgagcgcagaagtggtcctgcaactttatccgcctccatccagtctattaattgttgccgggaagctagagtaagtagttcgccagttaatagtttgcgcaacgttgttgccattgctacaggcatcgtggtgtcacgctcgtcgtttggtatggcttcattcagctccggttcccaacgatcaaggcgagttacatgatcccccatgttgtgcaaaaaagcggttagctccttcggtcctccgatcgttgtcagaagtaagttggccgcagtgttatcactcatggttatggcagcactgcataattctcttactgtcatgccatccgtaagatgcttttctgtgactggtgagtactcaaccaagtcattctgagaatagtgtatgcggcgaccgagttgctcttgcccggcgtcaatacgggataataccgcgccacatagcagaactttaaaagtgctcatcattggaaaacgttcttcggggcgaaaactctcaaggatcttaccgctgttgagatccagttcgatgtaacccactcgtgcacccaactgatcttcagcatcttttactttcaccagcgtttctgggtgagcaaaaacaggaaggcaaaatgccgcaaaaaagggaataagggcgacacggaaatgttgaatactcatactcttcctttttcaatattattgaagcatttatcagggttattgtctcatgagcggatacatatttgaatgtatttagaaaaataaacaaataggggttccgcgcacatttccccgaaaagtgccacctg

SEQ ID NO: 73 - DNA, 6470 bp, synthetic construct
  misc_feature 1..6470: note = pJP61-AAV-EF1a-minigenes-v1-WPRE-codonoptimized
  source 1..6470: mol_type = other DNA
ctgcgcgctcgctcgctcactgaggccgcccgggcaaagcccgggcgtcgggcgacctttggtcgcccggcctcagtgagcgagcgagcgcgcagagagggagtggccaactccatcactaggggttccttgtagttaatgattaacccgccatgctacttatctaccagggtaatggggatcctctagaactatagctagaattctagtggatccccccgcgccggctccggtgcccgtcagtgggcagagcgcacatcgcccacagtccccgagaagttggggggaggggtcggcaattgaaccggtgcctagagaaggtggcgcggggtaaactgggaaagtgatgtcgtgtactggctccgcctttttcccgagggtgggggagaaccgtatataagtgcagtagtcgccgtgaacgttctttttcgcaacgggtttgccgccagaacacaggtaagtgccgtgtgtggttcccgcgggcctggcctctttacgggttatggcccttgcgtgccttgaattacttccacctggctgcagtacgtgattcttgatcccgagcttcgggttggaagtgggtgggagagttcgaggccttgcgcttaaggagccccttcgcctcgtgcttgagttgaggcctggcctgggcgctggggccgccgcgtgcgaatctggtggcaccttcgcgcctgtctcgctgctttcgataagtctctagccatttaaaatttttgatgacctgctgcgacgctttttttctggcaagatagtcttgtaaatgcgggccaagatctgcacactggtatttcggtttttggggccgcgggcggcgacggggcccgtgcgtcccagcgcacatgttcggcgaggcggggcctgcgagcgcggccaccgagaatcggacgggggtagtctcaagctggccggcctgctctggtgcctggcctcgcgccgccgtgtatcgccccgccctgggcggcaaggctggcccggtcggcaccagttgcgtgagcggaaagatggccgcttcccggccctgctgcagggagctcaaaatggaggacgcggcgctcgggagagcgggcgggtgagtcacccacacaaaggaaaagggcctttccgtcctcagccgtcgcttcatgtgactccacggagtaccgggcgccgtccaggcacctcgattagttctcgagcttttggagtacgtcgtctttaggttggggggaggggttttatgcgatggagtttccccacactgagtgggtggagactgaagttaggccagcttggcacttgatgtaattctccttggaatttgccctttttgagtttggatcttggttcattctcaagcctcagacagtggttcaaagtttttttcttccatttcaggtgtcgtgagctagagctttattgcggtagtttatcacagttaaattgctaacgcagtcagtgcttctgacacaacagtctcgaacttaagctgcagaagttggtcgtgaggcactgggcaggtaagtatcaaggttacaagacaggtttaaggagaccaatagaaactgggcttgtcgagacagagaagactcttgcgtttctgataggcacctattggtcttactgacatccactttgcctttctctccacaggtgtccactcccagttcaattacagctcttaaggctagagtacttaatacgactcactataggctagcctcgagaattgtacaattcacgcgggccgccatggtgaactgtactgaagtacccgttgccattcacgcagatcaacttacccctacctggcgcgtctattccacagggagtaatgtctttcagaccgcagcatataatgggacaataaccgttgaggaattgaaaaaactgttggaacaggctgcatactatgtgtactctcgagtcaagaacctgaacagtagcagggtcccagacctgctcgtcgccgcatacaacgggcctcagaatcagagaaacgcccccagaataacctttgggggaccctccgattcaacaggcagcaatcaaaacggagagcggagcggcgcaaggtccaaacagaggcggccccaaggacttcctaacaatgctgcctactatcaaacacagacaaattcacctcgccgggcacggtcagtagcttcacagtctattatagcatacactatgagtttgggggctgaaaatagtgtggcctactctaataacagtatcgctgcttatgaagtacggcaaatagctcccggacaaacagggaagattgctgattacaattataaggctgcctataaacttggagcatcccaacgggttgccggagattcaggattcgcagcatattccagatatagaatcggaaactataaagccgcctacgacgcctacaaaaccttcccacccaccgagccaaaaaaggacaagaaaaagaaggctgatgaaacccaggctttgccacaaaggcagaagaagcagcagacagtaaccctcctcgccgcatatggaaaacagggcaatttcaaaaatttgagggaatttgtctttaagaatatagacggatatttcaagatctattctaaacatgccgcctaccaccaccatcatcaccattagtaagctcgcgtgatcaagcttatcgataatcaacctctggattacaaaatttgtgaaagattgactggtattcttaactatgttgctccttttacgctatgtggatacgctgctttaatgcctttgtatcatgctattgcttcccgtatggctttcattttctcctccttgtataaatcctggttgctgtctctttatgaggagttgtggcccgttgtcaggcaacgtggcgtggtgtgcactgtgtttgctgacgcaacccccactggttggggcattgccaccacctgtcagctcctttccgggactttcgctttccccctccctattgccacggcggaactcatcgccgcctgccttgcccgctgctggacaggggctcggctgttgggcactgacaattccgtggtgttgtcggggaaatcatcgtcctttccttggctgctcgcctgtgttgccacctggattctgcgcgggacgtccttctgctacgtcccttcggccctcaatccagcggaccttccttcccgcggcctgctgccggctctgcggcctcttccgcgtcttcgccttcgccctcagacgagtcggatctccctttgggccgcctccccgcatcgataccgtcgacccgggcggcctcgaggacggggtgaactacgcctgaggatccgatctttttccctctgccaaaaattatggggacatcatgaagccccttgagcatctgacttctggctaataaaggaaatttattttcattgcaatagtgtgttggaattttttgtgtctctcactcggaagcaattcgttgatctgaatttcgaccacccataatacccattaccctggtagataagtagcatggcgggttaatcattaactacaaggaacccctagtgatggagttggccactccctctctgcgcgctcgctcgctcactgaggccgggcgaccaaaggtcgcccgacgcccgggctttgcccgggcggcctcagtgagcgagcgagcgcgcagccttaattaacctaattcactggccgtcgttttacaacgtcgtgactgggaaaaccctggcgttacccaacttaatcgccttgcagcacatccccctttcgccagctggcgtaatagcgaagaggcccgcaccgatcgcccttcccaacagttgcgcagcctgaatggcgaatgggacgcgccctgtagcggcgcattaagcgcggcgggtgtggtggttacgcgcagcgtgaccgctacacttgccagcgccctagcgcccgctcctttcgctttcttcccttcctttctcgccacgttcgccggctttccccgtcaagctctaaatcgggggctccctttagggttccgatttagtgctttacggcacctcgaccccaaaaaacttgattagggtgatggttcacgtagtgggccatcgccctgatagacggtttttcgccctttgacgttggagtccacgttctttaatagtggactcttgttccaaactggaacaacactcaaccctatctcggtctattcttttgatttataagggattttgccgatttcggcctattggttaaaaaatgagctgatttaacaaaaatttaacgcgaattttaacaaaatattaacgcttacaatttaggtggcacttttcggggaaatgtgcgcggaacccctatttgtttatttttctaaatacattcaaatatgtatccgctcatgagacaataaccctgataaatgcttcaataatattgaaaaaggaagagtatgagtattcaacatttccgtgtcgcccttattcccttttttgcggcattttgccttcctgtttttgctcacccagaaacgctggtgaaagtaaaagatgctgaagatcagttgggtgcacgagtgggttacatcgaactggatctcaacagcggtaagatccttgagagttttcgccccgaagaacgttttccaatgatgagcacttttaaagttctgctatgtggcgcggtattatcccgtattgacgccgggcaagagcaactcggtcgccgcatacactattctcagaatgacttggttgagtactcaccagtcacagaaaagcatcttacggatggcatgacagtaagagaattatgcagtgctgccataaccatgagtgataacactgcggccaacttacttctgacaacgatcggaggaccgaaggagctaaccgcttttttgcacaacatgggggatcatgtaactcgccttgatcgttgggaaccggagctgaatgaagccataccaaacgacgagcgtgacaccacgatgcctgtagcaatggcaacaacgttgcgcaaactattaactggcgaactacttactctagcttcccggcaacaattaatagactggatggaggcggataaagttgcaggaccacttctgcgctcggcccttccggctggctggtttattgctgataaatctggagccggtgagcgtgggtctcgcggtatcattgcagcactggggccagatggtaagccctcccgtatcgtagttatctacacgacggggagtcaggcaactatggatgaacgaaatagacagatcgctgagataggtgcctcactgattaagcattggtaactgtcagaccaagtttactcatatatactttagattgatttaaaacttcatttttaatttaaaaggatctaggtgaagatcctttttgataatctcatgaccaaaatcccttaacgtgagttttcgttccactgagcgtcagaccccgtagaaaagatcaaaggatcttcttgagatcctttttttctgcgcgtaatctgctgcttgcaaacaaaaaaaccaccgctaccagcggtggtttgtttgccggatcaagagctaccaactctttttccgaaggtaactggcttcagcagagcgcagataccaaatactgttcttctagtgtagccgtagttaggccaccacttcaagaactctgtagcaccgcctacatacctcgctctgctaatcctgttaccagtggctgctgccagtggcgataagtcgtgtcttaccgggttggactcaagacgatagttaccggataaggcgcagcggtcgggctgaacggggggttcgtgcacacagcccagcttggagcgaacgacctacaccgaactgagatacctacagcgtgagctatgagaaagcgccacgcttcccgaagggagaaaggcggacaggtatccggtaagcggcagggtcggaacaggagagcgcacgagggagcttccagggggaaacgcctggtatctttatagtcctgtcgggtttcgccacctctgacttgagcgtcgatttttgtgatgctcgtcaggggggcggagcctatggaaaaacgccagcaacgcggcctttttacggttcctggccttttgctggccttttgctcacatgttctttcctgcgttatcccctgattctgtggataaccgtattaccgcctttgagtgagctgataccgctcgccgcagccgaacgaccgagcgcagcgagtcagtgagcgaggaagcggaagagcgcccaatacgcaaaccgcctctccccgcgcgttggccgattcattaatgcagctggcacgacaggtttcccgactggaaagcgggcagtgagcgcaacgcaattaatgtgagttagctcactcattaggcaccccaggctttacactttatgcttccggctcgtatgttgtgtggaattgtgagcggataacaatttcacacaggaaacagctatgaccatgattacgccagatttaattaaggccttaattagg

SEQ ID NO: 74 - DNA, 6260 bp, synthetic construct
  misc_feature 1..6260: note = pJP62-AAV-EF1a-minigenes-v2-WPRE-codonoptimized
  source 1..6260: mol_type = other DNA
ctgcgcgctcgctcgctcactgaggccgcccgggcaaagcccgggcgtcgggcgacctttggtcgcccggcctcagtgagcgagcgagcgcgcagagagggagtggccaactccatcactaggggttccttgtagttaatgattaacccgccatgctacttatctaccagggtaatggggatcctctagaactatagctagaattctagtggatccccccgcgccggctccggtgcccgtcagtgggcagagcgcacatcgcccacagtccccgagaagttggggggaggggtcggcaattgaaccggtgcctagagaaggtggcgcggggtaaactgggaaagtgatgtcgtgtactggctccgcctttttcccgagggtgggggagaaccgtatataagtgcagtagtcgccgtgaacgttctttttcgcaacgggtttgccgccagaacacaggtaagtgccgtgtgtggttcccgcgggcctggcctctttacgggttatggcccttgcgtgccttgaattacttccacctggctgcagtacgtgattcttgatcccgagcttcgggttggaagtgggtgggagagttcgaggccttgcgcttaaggagccccttcgcctcgtgcttgagttgaggcctggcctgggcgctggggccgccgcgtgcgaatctggtggcaccttcgcgcctgtctcgctgctttcgataagtctctagccatttaaaatttttgatgacctgctgcgacgctttttttctggcaagatagtcttgtaaatgcgggccaagatctgcacactggtatttcggtttttggggccgcgggcggcgacggggcccgtgcgtcccagcgcacatgttcggcgaggcggggcctgcgagcgcggccaccgagaatcggacgggggtagtctcaagctggccggcctgctctggtgcctggcctcgcgccgccgtgtatcgccccgccctgggcggcaaggctggcccggtcggcaccagttgcgtgagcggaaagatggccgcttcccggccctgctgcagggagctcaaaatggaggacgcggcgctcgggagagcgggcgggtgagtcacccacacaaaggaaaagggcctttccgtcctcagccgtcgcttcatgtgactccacggagtaccgggcgccgtccaggcacctcgattagttctcgagcttttggagtacgtcgtctttaggttggggggaggggttttatgcgatggagtttccccacactgagtgggtggagactgaagttaggccagcttggcacttgatgtaattctccttggaatttgccctttttgagtttggatcttggttcattctcaagcctcagacagtggttcaaagtttttttcttccatttcaggtgtcgtgagctagagctttattgcggtagtttatcacagttaaattgctaacgcagtcagtgcttctgacacaacagtctcgaacttaagctgcagaagttggtcgtgaggcactgggcaggtaagtatcaaggttacaagacaggtttaaggagaccaatagaaactgggcttgtcgagacagagaagactcttgcgtttctgataggcacctattggtcttactgacatccactttgcctttctctccacaggtgtccactcccagttcaattacagctcttaaggctagagtacttaatacgactcactataggctagcctcgagaattgtacaattcacgcgggccgccatgtttgtttttctcgttttgctcccactggcagcatacaacctgattgattcctatttcgtagtagcagcctaccttcttctggacaggctcaatcaacttgctgcttacaaattgctcgaacaatggaacctcgtcgcagcctatgttctgctttttcttgcattcgtagtcgctgcatatctcctgagtgcaggcattttcggtgctgccgcttatgtgttggcctggctctatgcagccgttgctgcatacgctttgtgggaaatccaacaagtcgtagctgcctacaccatggccgatctcgtgtacgccttggccgcatactttctgtggttgttgtggcctgtgacagctgcttattttttggcatttgttgtgtttttgctcgcagcatattttcttaaaaaggacgctccctacatagctgcctacttcctgaataggttcaccaccacactggctgcctatttgctcatgcccattctgactttgacagctgcatataaaatagcagattacaactataagctcgctgcttacttcacaatctccgtaaccactgagattgccgcatattttgtgttggctgctgtttatcgcatcgcagcctattacctggctacagcactgctcactcttgctgcataccatcatcatcaccatcattagtaagctcgcgtgatcaagcttatcgataatcaacctctggattacaaaatttgtgaaagattgactggtattcttaactatgttgctccttttacgctatgtggatacgctgctttaatgcctttgtatcatgctattgcttcccgtatggctttcattttctcctccttgtataaatcctggttgctgtctctttatgaggagttgtggcccgttgtcaggcaacgtggcgtggtgtgcactgtgtttgctgacgcaacccccactggttggggcattgccaccacctgtcagctcctttccgggactttcgctttccccctccctattgccacggcggaactcatcgccgcctgccttgcccgctgctggacaggggctcggctgttgggcactgacaattccgtggtgttgtcggggaaatcatcgtcctttccttggctgctcgcctgtgttgccacctggattctgcgcgggacgtccttctgctacgtcccttcggccctcaatccagcggaccttccttcccgcggcctgctgccggctctgcggcctcttccgcgtcttcgccttcgccctcagacgagtcggatctccctttgggccgcctccccgcatcgataccgtcgacccgggcggcctcgaggacggggtgaactacgcctgaggatccgatctttttccctctgccaaaaattatggggacatcatgaagccccttgagcatctgacttctggctaataaaggaaatttattttcattgcaatagtgtgttggaattttttgtgtctctcactcggaagcaattcgttgatctgaatttcgaccacccataatacccattaccctggtagataagtagcatggcgggttaatcattaactacaaggaacccctagtgatggagttggccactccctctctgcgcgctcgctcgctcactgaggccgggcgaccaaaggtcgcccgacgcccgggctttgcccgggcggcctcagtgagcgagcgagcgcgcagccttaattaacctaattcactggccgtcgttttacaacgtcgtgactgggaaaaccctggcgttacccaacttaatcgccttgcagcacatccccctttcgccagctggcgtaatagcgaagaggcccgcaccgatcgcccttcccaacagttgcgcagcctgaatggcgaatgggacgcgccctgtagcggcgcattaagcgcggcgggtgtggtggttacgcgcagcgtgaccgctacacttgccagcgccctagcgcccgctcctttcgctttcttcccttcctttctcgccacgttcgccggctttccccgtcaagctctaaatcgggggctccctttagggttccgatttagtgctttacggcacctcgaccccaaaaaacttgattagggtgatggttcacgtagtgggccatcgccctgatagacggtttttcgccctttgacgttggagtccacgttctttaatagtggactcttgttccaaactggaacaacactcaaccctatctcggtctattcttttgatttataagggattttgccgatttcggcctattggttaaaaaatgagctgatttaacaaaaatttaacgcgaattttaacaaaatattaacgcttacaatttaggtggcacttttcggggaaatgtgcgcggaacccctatttgtttatttttctaaatacattcaaatatgtatccgctcatgagacaataaccctgataaatgcttcaataatattgaaaaaggaagagtatgagtattcaacatttccgtgtcgcccttattcccttttttgcggcattttgccttcctgtttttgctcacccagaaacgctggtgaaagtaaaagatgctgaagatcagttgggtgcacgagtgggttacatcgaactggatctcaacagcggtaagatccttgagagttttcgccccgaagaacgttttccaatgatgagcacttttaaagttctgctatgtggcgcggtattatcccgtattgacgccgggcaagagcaactcggtcgccgcatacactattctcagaatgacttggttgagtactcaccagtcacagaaaagcatcttacggatggcatgacagtaagagaattatgcagtgctgccataaccatgagtgataacactgcggccaacttacttctgacaacgatcggaggaccgaaggagctaaccgcttttttgcacaacatgggggatcatgtaactcgccttgatcgttgggaaccggagctgaatgaagccataccaaacgacgagcgtgacaccacgatgcctgtagcaatggcaacaacgttgcgcaaactattaactggcgaactacttactctagcttcccggcaacaattaatagactggatggaggcggataaagttgcaggaccacttctgcgctcggcccttccggctggctggtttattgctgataaatctggagccggtgagcgtgggtctcgcggtatcattgcagcactggggccagatggtaagccctcccgtatcgtagttatctacacgacggggagtcaggcaactatggatgaacgaaatagacagatcgctgagataggtgcctcactgattaagcattggtaactgtcagaccaagtttactcatatatactttagattgatttaaaacttcatttttaatttaaaaggatctaggtgaagatcctttttgataatctcatgaccaaaatcccttaacgtgagttttcgttccactgagcgtcagaccccgtagaaaagatcaaaggatcttcttgagatcctttttttctgcgcgtaatctgctgcttgcaaacaaaaaaaccaccgctaccagcggtggtttgtttgccggatcaagagctaccaactctttttccgaaggtaactggcttcagcagagcgcagataccaaatactgttcttctagtgtagccgtagttaggccaccacttcaagaactctgtagcaccgcctacatacctcgctctgctaatcctgttaccagtggctgctgccagtggcgataagtcgtgtcttaccgggttggactcaagacgatagttaccggataaggcgcagcggtcgggctgaacggggggttcgtgcacacagcccagcttggagcgaacgacctacaccgaactgagatacctacagcgtgagctatgagaaagcgccacgcttcccgaagggagaaaggcggacaggtatccggtaagcggcagggtcggaacaggagagcgcacgagggagcttccagggggaaacgcctggtatctttatagtcctgtcgggtttcgccacctctgacttgagcgtcgatttttgtgatgctcgtcaggggggcggagcctatggaaaaacgccagcaacgcggcctttttacggttcctggccttttgctggccttttgctcacatgttctttcctgcgttatcccctgattctgtggataaccgtattaccgcctttgagtgagctgataccgctcgccgcagccgaacgaccgagcgcagcgagtcagtgagcgaggaagcggaagagcgcccaatacgcaaaccgcctctccccgcgcgttggccgattcattaatgcagctggcacgacaggtttcccgactggaaagcgggcagtgagcgcaacgcaattaatgtgagttagctcactcattaggcaccccaggctttacactttatgcttccggctcgtatgttgtgtggaattgtgagcggataacaatttcacacaggaaacagctatgaccatgattacgccagatttaattaaggccttaattagg

SEQ ID NO: 75 - DNA, 6476 bp, synthetic construct
  misc_feature 1..6476: note = pJP63-AAV-EF1a-minigenes-v3-WPRE-codonoptimized
  source 1..6476: mol_type = other DNA
ctgcgcgctcgctcgctcactgaggccgcccgggcaaagcccgggcgtcgggcgacctttggtcgcccggcctcagtgagcgagcgagcgcgcagagagggagtggccaactccatcactaggggttccttgtagttaatgattaacccgccatgctacttatctaccagggtaatggggatcctctagaactatagctagaattctagtggatccccccgcgccggctccggtgcccgtcagtgggcagagcgcacatcgcccacagtccccgagaagttggggggaggggtcggcaattgaaccggtgcctagagaaggtggcgcggggtaaactgggaaagtgatgtcgtgtactggctccgcctttttcccgagggtgggggagaaccgtatataagtgcagtagtcgccgtgaacgttctttttcgcaacgggtttgccgccagaacacaggtaagtgccgtgtgtggttcccgcgggcctggcctctttacgggttatggcccttgcgtgccttgaattacttccacctggctgcagtacgtgattcttgatcccgagcttcgggttggaagtgggtgggagagttcgaggccttgcgcttaaggagccccttcgcctcgtgcttgagttgaggcctggcctgggcgctggggccgccgcgtgcgaatctggtggcaccttcgcgcctgtctcgctgctttcgataagtctctagccatttaaaatttttgatgacctgctgcgacgctttttttctggcaagatagtcttgtaaatgcgggccaagatctgcacactggtatttcggtttttggggccgcgggcggcgacggggcccgtgcgtcccagcgcacatgttcggcgaggcggggcctgcgagcgcggccaccgagaatcggacgggggtagtctcaagctggccggcctgctctggtgcctggcctcgcgccgccgtgtatcgccccgccctgggcggcaaggctggcccggtcggcaccagttgcgtgagcggaaagatggccgcttcccggccctgctgcagggagctcaaaatggaggacgcggcgctcgggagagcgggcgggtgagtcacccacacaaaggaaaagggcctttccgtcctcagccgtcgcttcatgtgactccacggagtaccgggcgccgtccaggcacctcgattagttctcgagcttttggagtacgtcgtctttaggttggggggaggggttttatgcgatggagtttccccacactgagtgggtggagactgaagttaggccagcttggcacttgatgtaattctccttggaatttgccctttttgagtttggatcttggttcattctcaagcctcagacagtggttcaaagtttttttcttccatttcaggtgtcgtgagctagagctttattgcggtagtttatcacagttaaattgctaacgcagtcagtgcttctgacacaacagtctcgaacttaagctgcagaagttggtcgtgaggcactgggcaggtaagtatcaaggttacaagacaggtttaaggagaccaatagaaactgggcttgtcgagacagagaagactcttgcgtttctgataggcacctattggtcttactgacatccactttgcctttctctccacaggtgtccactcccagttcaattacagctcttaaggctagagtacttaatacgactcactataggctagcctcgagaattgtacaattcacgcgggccgccatgacccaagatttgtttctgccattcttttctaacgtcacctggtttgcagcttacgacggagttcctttcgtcgtttcaactggctaccatttcagagaagctgcatacgacgatcaaatcgggtactacaggcgggcaactcgaaggataagagcagcttattggatctgcctgcttcaattcgcttacgcaaacagaaatcgctttgctgcttattctgtacttttgtttcttgccttcgtggtgtttctccttgttacagccgcttataatgagtttgcttgtgtggttgctgacgccgtgatcaaaactctggccgcctatgatctcctcataagaaaatctaaccataactttttggttcaagccgccgcatacgcaatcgcaagtgagttcagtagtcttccatcctacgccgctttcgctgcctacaaatatctctattttataaagggattgaacaatttgaatcgcggtgccgcttacctgctgctccttgacaggcttaatcaactcgaatccaagatgtctgccgcttacatgtggctctcatactttatagccagcttccgactcttcgccagggccgcttatgaatttgtatttaagaacatagatgggtacttcaaaatctatagcgcagcctactttcaccaaaaactccttaagtccattgctgccactagaggcgctgctgcttacttccttcttgtgaccctcgccattctgacagctctgaggttgtgtgcagcttacagcggttaccttaaattgacagacaatgtttacataaaaaacgctgccgcttaccccttgaacattataccacttactactgctgccaagcttatggtcgccgcttaccatcaccaccaccatcattagtaagctcgcgtgatcaagcttatcgataatcaacctctggattacaaaatttgtgaaagattgactggtattcttaactatgttgctccttttacgctatgtggatacgctgctttaatgcctttgtatcatgctattgcttcccgtatggctttcattttctcctccttgtataaatcctggttgctgtctctttatgaggagttgtggcccgttgtcaggcaacgtggcgtggtgtgcactgtgtttgctgacgcaacccccactggttggggcattgccaccacctgtcagctcctttccgggactttcgctttccccctccctattgccacggcggaactcatcgccgcctgccttgcccgctgctggacaggggctcggctgttgggcactgacaattccgtggtgttgtcggggaaatcatcgtcctttccttggctgctcgcctgtgttgccacctggattctgcgcgggacgtccttctgctacgtcccttcggccctcaatccagcggaccttccttcccgcggcctgctgccggctctgcggcctcttccgcgtcttcgccttcgccctcagacgagtcggatctccctttgggccgcctccccgcatcgataccgtcgacccgggcggcctcgaggacggggtgaactacgcctgaggatccgatctttttccctctgccaaaaattatggggacatcatgaagccccttgagcatctgacttctggctaataaaggaaatttattttcattgcaatagtgtgttggaattttttgtgtctctcactcggaagcaattcgttgatctgaatttcgaccacccataatacccattaccctggtagataagtagcatggcgggttaatcattaactacaaggaacccctagtgatggagttggccactccctctctgcgcgctcgctcgctcactgaggccgggcgaccaaaggtcgcccgacgcccgggctttgcccgggcggcctcagtgagcgagcgagcgcgcagccttaattaacctaattcactggccgtcgttttacaacgtcgtgactgggaaaaccctggcgttacccaacttaatcgccttgcagcacatccccctttcgccagctggcgtaatagcgaagaggcccgcaccgatcgcccttcccaacagttgcgcagcctgaatggcgaatgggacgcgccctgtagcggcgcattaagcgcggcgggtgtggtggttacgcgcagcgtgaccgctacacttgccagcgccctagcgcccgctcctttcgctttcttcccttcctttctcgccacgttcgccggctttccccgtcaagctctaaatcgggggctccctttagggttccgatttagtgctttacggcacctcgaccccaaaaaacttgattagggtgatggttcacgtagtgggccatcgccctgatagacggtttttcgccctttgacgttggagtccacgttctttaatagtggactcttgttccaaactggaacaacactcaaccctatctcggtctattcttttgatttataagggattttgccgatttcggcctattggttaaaaaatgagctgatttaacaaaaatttaacgcgaattttaacaaaatattaacgcttacaatttaggtggcacttttcggggaaatgtgcgcggaacccctatttgtttatttttctaaatacattcaaatatgtatccgctcatgagacaataaccctgataaatgcttcaataatattgaaaaaggaagagtatgagtattcaacatttccgtgtcgcccttattcccttttttgcggcattttgccttcctgtttttgctcacccagaaacgctggtgaaagtaaaagatgctgaagatcagttgggtgcacgagtgggttacatcgaactggatctcaacagcggtaagatccttgagagttttcgccccgaagaacgttttccaatgatgagcacttttaaagttctgctatgtggcgcggtattatcccgtattgacgccgggcaagagcaactcggtcgccgcatacactattctcagaatgacttggttgagtactcaccagtcacagaaaagcatcttacggatggcatgacagtaagagaattatgcagtgctgccataaccatgagtgataacactgcggccaacttacttctgacaacgatcggaggaccgaaggagctaaccgcttttttgcacaacatgggggatcatgtaactcgccttgatcgttgggaaccggagctgaatgaagccataccaaacgacgagcgtgacaccacgatgcctgtagcaatggcaacaacgttgcgcaaactattaactggcgaactacttactctagcttcccggcaacaattaatagactggatggaggcggataaagttgcaggaccacttctgcgctcggcccttccggctggctggtttattgctgataaatctggagccggtgagcgtgggtctcgcggtatcattgcagcactggggccagatggtaagccctcccgtatcgtagttatctacacgacggggagtcaggcaactatggatgaacgaaatagacagatcgctgagataggtgcctcactgattaagcattggtaactgtcagaccaagtttactcatatatactttagattgatttaaaacttcatttttaatttaaaaggatctaggtgaagatcctttttgataatctcatgaccaaaatcccttaacgtgagttttcgttccactgagcgtcagaccccgtagaaaagatcaaaggatcttcttgagatcctttttttctgcgcgtaatctgctgcttgcaaacaaaaaaaccaccgctaccagcggtggtttgtttgccggatcaagagctaccaactctttttccgaaggtaactggcttcagcagagcgcagataccaaatactgttcttctagtgtagccgtagttaggccaccacttcaagaactctgtagcaccgcctacatacctcgctctgctaatcctgttaccagtggctgctgccagtggcgataagtcgtgtcttaccgggttggactcaagacgatagttaccggataaggcgcagcggtcgggctgaacggggggttcgtgcacacagcccagcttggagcgaacgacctacaccgaactgagatacctacagcgtgagctatgagaaagcgccacgcttcccgaagggagaaaggcggacaggtatccggtaagcggcagggtcggaacaggagagcgcacgagggagcttccagggggaaacgcctggtatctttatagtcctgtcgggtttcgccacctctgacttgagcgtcgatttttgtgatgctcgtcaggggggcggagcctatggaaaaacgccagcaacgcggcctttttacggttcctggccttttgctggccttttgctcacatgttctttcctgcgttatcccctgattctgtggataaccgtattaccgcctttgagtgagctgataccgctcgccgcagccgaacgaccgagcgcagcgagtcagtgagcgaggaagcggaagagcgcccaatacgcaaaccgcctctccccgcgcgttggccgattcattaatgcagctggcacgacaggtttcccgactggaaagcgggcagtgagcgcaacgcaattaatgtgagttagctcactcattaggcaccccaggctttacactttatgcttccggctcgtatgttgtgtggaattgtgagcggataacaatttcacacaggaaacagctatgaccatgattacgccagatttaattaaggccttaattagg

SEQ ID NO: 76 - DNA, 6515 bp, synthetic construct
  misc_feature 1..6515: note = pJP64-AAV-EF1a-minigenes-v4-WPRE-codonoptimized
  source 1..6515: mol_type = other DNA
ctgcgcgctcgctcgctcactgaggccgcccgggcaaagcccgggcgtcgggcgacctttggtcgcccggcctcagtgagcgagcgagcgcgcagagagggagtggccaactccatcactaggggttccttgtagttaatgattaacccgccatgctacttatctaccagggtaatggggatcctctagaactatagctagaattctagtggatccccccgcgccggctccggtgcccgtcagtgggcagagcgcacatcgcccacagtccccgagaagttggggggaggggtcggcaattgaaccggtgcctagagaaggtggcgcggggtaaactgggaaagtgatgtcgtgtactggctccgcctttttcccgagggtgggggagaaccgtatataagtgcagtagtcgccgtgaacgttctttttcgcaacgggtttgccgccagaacacaggtaagtgccgtgtgtggttcccgcgggcctggcctctttacgggttatggcccttgcgtgccttgaattacttccacctggctgcagtacgtgattcttgatcccgagcttcgggttggaagtgggtgggagagttcgaggccttgcgcttaaggagccccttcgcctcgtgcttgagttgaggcctggcctgggcgctggggccgccgcgtgcgaatctggtggcaccttcgcgcctgtctcgctgctttcgataagtctctagccatttaaaatttttgatgacctgctgcgacgctttttttctggcaagatagtcttgtaaatgcgggccaagatctgcacactggtatttcggtttttggggccgcgggcggcgacggggcccgtgcgtcccagcgcacatgttcggcgaggcggggcctgcgagcgcggccaccgagaatcggacgggggtagtctcaagctggccggcctgctctggtgcctggcctcgcgccgccgtgtatcgccccgccctgggcggcaaggctggcccggtcggcaccagttgcgtgagcggaaagatggccgcttcccggccctgctgcagggagctcaaaatggaggacgcggcgctcgggagagcgggcgggtgagtcacccacacaaaggaaaagggcctttccgtcctcagccgtcgcttcatgtgactccacggagtaccgggcgccgtccaggcacctcgattagttctcgagcttttggagtacgtcgtctttaggttggggggaggggttttatgcgatggagtttccccacactgagtgggtggagactgaagttaggccagcttggcacttgatgtaattctccttggaatttgccctttttgagtttggatcttggttcattctcaagcctcagacagtggttcaaagtttttttcttccatttcaggtgtcgtgagctagagctttattgcggtagtttatcacagttaaattgctaacgcagtcagtgcttctgacacaacagtctcgaacttaagctgcagaagttggtcgtgaggcactgggcaggtaagtatcaaggttacaagacaggtttaaggagaccaatagaaactgggcttgtcgagacagagaagactcttgcgtttctgataggcacctattggtcttactgacatccactttgcctttctctccacaggtgtccactcccagttcaattacagctcttaaggctagagtacttaatacgactcactataggctagcctcgagaattgtacaattcacgcgggccgccatgacacctatcaatctcgtgcgggaccttccccaaggtttctccgctctggagcctttggtcgctgcttacttgaaccagcttgaatctaagatgagtgggaaaggccagcaacaacagggtcaaaccgtgactaagaagtctgccgctgaagcatccaagaagccacgacaaaagcggaccgccaccaaagcatataatgtgacacaggcttttgggcgacgaggacccgagcaaacacaagccgcatactatctccagcccaggactttcctgctggccgcttatcttcctttcttttccaacgtaacttggttccacgctatccatgttgctgcctatgatgcagctcttgccctcttgctcttggatcgcctgaaccagctcgccgcttacttcttgttcctcacctggatctgtctcgcagcttacaacagaaatagatttctctacataatcaagctcatatttctgtgggcagcttatagcgaggagacaggaactttgattgtaaactcagtgcttctttttgccgcatataccaacggtaccaaacgcttcgacaaccctgttctgcccttcaacgctgcataccacgggaaagaggatctgaaatttcctagaggccagggcgtccccataaataccaacagctccccagacgaccaaattggttattatcgccgcgctacccggaggatcgcagcctatagtgtccttttgttcctggcattcgtggctgcatatagattcccaaacatcacaaatttgtgcccttttggcgaggtctttaacgctaccaggtttgctgcttacacactcgcctgcttcgtactggcagccgtgtaccggatcaactgggcagcatactttttgttggttactctggcaattctcgctgcataccatcaccatcaccaccattagtaagctcgcgtgatcaagcttatcgataatcaacctctggattacaaaatttgtgaaagattgactggtattcttaactatgttgctccttttacgctatgtggatacgctgctttaatgcctttgtatcatgctattgcttcccgtatggctttcattttctcctccttgtataaatcctggttgctgtctctttatgaggagttgtggcccgttgtcaggcaacgtggcgtggtgtgcactgtgtttgctgacgcaacccccactggttggggcattgccaccacctgtcagctcctttccgggactttcgctttccccctccctattgccacggcggaactcatcgccgcctgccttgcccgctgctggacaggggctcggctgttgggcactgacaattccgtggtgttgtcggggaaatcatcgtcctttccttggctgctcgcctgtgttgccacctggattctgcgcgggacgtccttctgctacgtcccttcggccctcaatccagcggaccttccttcccgcggcctgctgccggctctgcggcctcttccgcgtcttcgccttcgccctcagacgagtcggatctccctttgggccgcctccccgcatcgataccgtcgacccgggcggcctcgaggacggggtgaactacgcctgaggatccgatctttttccctctgccaaaaattatggggacatcatgaagccccttgagcatctgacttctggctaataaaggaaatttattttcattgcaatagtgtgttggaattttttgtgtctctcactcggaagcaattcgttgatctgaatttcgaccacccataatacccattaccctggtagataagtagcatggcgggttaatcattaactacaaggaacccctagtgatggagttggccactccctctctgcgcgctcgctcgctcactgaggccgggcgaccaaaggtcgcccgacgcccgggctttgcccgggcggcctcagtgagcgagcgagcgcgcagccttaattaacctaattcactggccgtcgttttacaacgtcgtgactgggaaaaccctggcgttacccaacttaatcgccttgcagcacatccccctttcgccagctggcgtaatagcgaagaggcccgcaccgatcgcccttcccaacagttgcgcagcctgaatggcgaatgggacgcgccctgtagcggcgcattaagcgcggcgggtgtggtggttacgcgcagcgtgaccgctacacttgccagcgccctagcgcccgctcctttcgctttcttcccttcctttctcgccacgttcgccggctttccccgtcaagctctaaatcgggggctccctttagggttccgatttagtgctttacggcacctcgaccccaaaaaacttgattagggtgatggttcacgtagtgggccatcgccctgatagacggtttttcgccctttgacgttggagtccacgttctttaatagtggactcttgttccaaactggaacaacactcaaccctatctcggtctattcttttgatttataagggattttgccgatttcggcctattggttaaaaaatgagctgatttaacaaaaatttaacgcgaattttaacaaaatattaacgcttacaatttaggtggcacttttcggggaaatgtgcgcggaacccctatttgtttatttttctaaatacattcaaatatgtatccgctcatgagacaataaccctgataaatgcttcaataatattgaaaaaggaagagtatgagtattcaacatttccgtgtcgcccttattcccttttttgcggcattttgccttcctgtttttgctcacccagaaacgctggtgaaagtaaaagatgctgaagatcagttgggtgcacgagtgggttacatcgaactggatctcaacagcggtaagatccttgagagttttcgccccgaagaacgttttccaatgatgagcacttttaaagttctgctatgtggcgcggtattatcccgtattgacgccgggcaagagcaactcggtcgccgcatacactattctcagaatgacttggttgagtactcaccagtcacagaaaagcatcttacggatggcatgacagtaagagaattatgcagtgctgccataaccatgagtgataacactgcggccaacttacttctgacaacgatcggaggaccgaaggagctaaccgcttttttgcacaacatgggggatcatgtaactcgccttgatcgttgggaaccggagctgaatgaagccataccaaacgacgagcgtgacaccacgatgcctgtagcaatggcaacaacgttgcgcaaactattaactggcgaactacttactctagcttcccggcaacaattaatagactggatggaggcggataaagttgcaggaccacttctgcgctcggcccttccggctggctggtttattgctgataaatctggagccggtgagcgtgggtctcgcggtatcattgcagcactggggccagatggtaagccctcccgtatcgtagttatctacacgacggggagtcaggcaactatggatgaacgaaatagacagatcgctgagataggtgcctcactgattaagcattggtaactgtcagaccaagtttactcatatatactttagattgatttaaaacttcatttttaatttaaaaggatctaggtgaagatcctttttgataatctcatgaccaaaatcccttaacgtgagttttcgttccactgagcgtcagaccccgtagaaaagatcaaaggatcttcttgagatcctttttttctgcgcgtaatctgctgcttgcaaacaaaaaaaccaccgctaccagcggtggtttgtttgccggatcaagagctaccaactctttttccgaaggtaactggcttcagcagagcgcagataccaaatactgttcttctagtgtagccgtagttaggccaccacttcaagaactctgtagcaccgcctacatacctcgctctgctaatcctgttaccagtggctgctgccagtggcgataagtcgtgtcttaccgggttggactcaagacgatagttaccggataaggcgcagcggtcgggctgaacggggggttcgtgcacacagcccagcttggagcgaacgacctacaccgaactgagatacctacagcgtgagctatgagaaagcgccacgcttcccgaagggagaaaggcggacaggtatccggtaagcggcagggtcggaacaggagagcgcacgagggagcttccagggggaaacgcctggtatctttatagtcctgtcgggtttcgccacctctgacttgagcgtcgatttttgtgatgctcgtcaggggggcggagcctatggaaaaacgccagcaacgcggcctttttacggttcctggccttttgctggccttttgctcacatgttctttcctgcgttatcccctgattctgtggataaccgtattaccgcctttgagtgagctgataccgctcgccgcagccgaacgaccgagcgcagcgagtcagtgagcgaggaagcggaagagcgcccaatacgcaaaccgcctctccccgcgcgttggccgattcattaatgcagctggcacgacaggtttcccgactggaaagcgggcagtgagcgcaacgcaattaatgtgagttagctcactcattaggcaccccaggctttacactttatgcttccggctcgtatgttgtgtggaattgtgagcggataacaatttcacacaggaaacagctatgaccatgattacgccagatttaattaaggccttaattagg

SEQ ID NO: 77 - DNA, 6494 bp, synthetic construct
  misc_feature 1..6494: note = pJP65-AAV-EF1a-minigenes-v5-WPRE-codonoptimized
  source 1..6494: mol_type = other DNA
ctgcgcgctcgctcgctcactgaggccgcccgggcaaagcccgggcgtcgggcgacctttggtcgcccggcctcagtgagcgagcgagcgcgcagagagggagtggccaactccatcactaggggttccttgtagttaatgattaacccgccatgctacttatctaccagggtaatggggatcctctagaactatagctagaattctagtggatccccccgcgccggctccggtgcccgtcagtgggcagagcgcacatcgcccacagtccccgagaagttggggggaggggtcggcaattgaaccggtgcctagagaaggtggcgcggggtaaactgggaaagtgatgtcgtgtactggctccgcctttttcccgagggtgggggagaaccgtatataagtgcagtagtcgccgtgaacgttctttttcgcaacgggtttgccgccagaacacaggtaagtgccgtgtgtggttcccgcgggcctggcctctttacgggttatggcccttgcgtgccttgaattacttccacctggctgcagtacgtgattcttgatcccgagcttcgggttggaagtgggtgggagagttcgaggccttgcgcttaaggagccccttcgcctcgtgcttgagttgaggcctggcctgggcgctggggccgccgcgtgcgaatctggtggcaccttcgcgcctgtctcgctgctttcgataagtctctagccatttaaaatttttgatgacctgctgcgacgctttttttctggcaagatagtcttgtaaatgcgggccaagatctgcacactggtatttcggtttttggggccgcgggcggcgacggggcccgtgcgtcccagcgcacatgttcggcgaggcggggcctgcgagcgcggccaccgagaatcggacgggggtagtctcaagctggccggcctgctctggtgcctggcctcgcgccgccgtgtatcgccccgccctgggcggcaaggctggcccggtcggcaccagttgcgtgagcggaaagatggccgcttcccggccctgctgcagggagctcaaaatggaggacgcggcgctcgggagagcgggcgggtgagtcacccacacaaaggaaaagggcctttccgtcctcagccgtcgcttcatgtgactccacggagtaccgggcgccgtccaggcacctcgattagttctcgagcttttggagtacgtcgtctttaggttggggggaggggttttatgcgatggagtttccccacactgagtgggtggagactgaagttaggccagcttggcacttgatgtaattctccttggaatttgccctttttgagtttggatcttggttcattctcaagcctcagacagtggttcaaagtttttttcttccatttcaggtgtcgtgagctagagctttattgcggtagtttatcacagttaaattgctaacgcagtcagtgcttctgacacaacagtctcgaacttaagctgcagaagttggtcgtgaggcactgggcaggtaagtatcaaggttacaagacaggtttaaggagaccaatagaaactgggcttgtcgagacagagaagactcttgcgtttctgataggcacctattggtcttactgacatccactttgcctttctctccacaggtgtccactcccagttcaattacagctcttaaggctagagtacttaatacgactcactataggctagcctcgagaattgtacaattcacgcgggccgccatgtgtaatgaccctttcctgggggtttattatcataagaataataaatcctggatggaaagcgagttcagggtcgcagcatatgatctggatgacttctctaaacagctccagcagtccatgtcatctgccgatagcactgctgcatatagcctgctgatcgtaaataacgcaacaaatgtcgttataaaagttgctgcttataacttgttgaaggactgtccagccgtcgccgcctactttcaccaaaagcttcttaaatcaatagcagcaacacggggagccgctgcatatgtcgtccaaaccattgaggtaaacagtttctctgggtacctgaaggccgcatactataaatttgtacgcattcaacctgggcagacattttcagtgctggctgcatacgcaaaacttatggtcgtaatcccagactacaatacttacaagaatgcagcatacgtcttgaaacttaaagtggatactgctaatcctaaaacaccaaaggctgcttacaccggaatcgcagtagagcaggataaaaatacccaggaggtattcgcacaggtcaagcaaatctataaaactccccctattaaagactttggtggttttaacttttcccagattcttcccgatccatctaaaccaagcaaaaggagctttattgaagatttgctgttcaacaaagtcacattggctgacgcaggtttcattaaacagtatggggattgccttgccgcctacagaggcatggttctggggagtctcgcagcaaccgtccggcttcaagccgcctatgctttggcatattacaacactaccaaggccgcatacccaacagtagtggtcaatgcagccaatgtttatctcaagcacggggctgcttaccaccatcaccaccatcattagtaagctcgcgtgatcaagcttatcgataatcaacctctggattacaaaatttgtgaaagattgactggtattcttaactatgttgctccttttacgctatgtggatacgctgctttaatgcctttgtatcatgctattgcttcccgtatggctttcattttctcctccttgtataaatcctggttgctgtctctttatgaggagttgtggcccgttgtcaggcaacgtggcgtggtgtgcactgtgtttgctgacgcaacccccactggttggggcattgccaccacctgtcagctcctttccgggactttcgctttccccctccctattgccacggcggaactcatcgccgcctgccttgcccgctgctggacaggggctcggctgttgggcactgacaattccgtggtgttgtcggggaaatcatcgtcctttccttggctgctcgcctgtgttgccacctggattctgcgcgggacgtccttctgctacgtcccttcggccctcaatccagcggaccttccttcccgcggcctgctgccggctctgcggcctcttccgcgtcttcgccttcgccctcagacgagtcggatctccctttgggccgcctccccgcatcgataccgtcgacccgggcggcctcgaggacggggtgaactacgcctgaggatccgatctttttccctctgccaaaaattatggggacatcatgaagccccttgagcatctgacttctggctaataaaggaaatttattttcattgcaatagtgtgttggaattttttgtgtctctcactcggaagcaattcgttgatctgaatttcgaccacccataatacccattaccctggtagataagtagcatggcgggttaatcattaactacaaggaacccctagtgatggagttggccactccctctctgcgcgctcgctcgctcactgaggccgggcgaccaaaggtcgcccgacgcccgggctttgcccgggcggcctcagtgagcgagcgagcgcgcagccttaattaacctaattcactggccgtcgttttacaacgtcgtgactgggaaaaccctggcgttacccaacttaatcgccttgcagcacatccccctttcgccagctggcgtaatagcgaagaggcccgcaccgatcgcccttcccaacagttgcgcagcctgaatggcgaatgggacgcgccctgtagcggcgcattaagcgcggcgggtgtggtggttacgcgcagcgtgaccgctacacttgccagcgccctagcgcccgctcctttcgctttcttcccttcctttctcgccacgttcgccggctttccccgtcaagctctaaatcgggggctccctttagggttccgatttagtgctttacggcacctcgaccccaaaaaacttgattagggtgatggttcacgtagtgggccatcgccctgatagacggtttttcgccctttgacgttggagtccacgttctttaatagtggactcttgttccaaactggaacaacactcaaccctatctcggtctattcttttgatttataagggattttgccgatttcggcctattggttaaaaaatgagctgatttaacaaaaatttaacgcgaattttaacaaaatattaacgcttacaatttaggtggcacttttcggggaaatgtgcgcggaacccctatttgtttatttttctaaatacattcaaatatgtatccgctcatgagacaataaccctgataaatgcttcaataatattgaaaaaggaagagtatgagtattcaacatttccgtgtcgcccttattcccttttttgcggcattttgccttcctgtttttgctcacccagaaacgctggtgaaagtaaaagatgctgaagatcagttgggtgcacgagtgggttacatcgaactggatctcaacagcggtaagatccttgagagttttcgccccgaagaacgttttccaatgatgagcacttttaaagttctgctatgtggcgcggtattatcccgtattgacgccgggcaagagcaactcggtcgccgcatacactattctcagaatgacttggttgagtactcaccagtcacagaaaagcatcttacggatggcatgacagtaagagaattatgcagtgctgccataaccatgagtgataacactgcggccaacttacttctgacaacgatcggaggaccgaaggagctaaccgcttttttgcacaacatgggggatcatgtaactcgccttgatcgttgggaaccggagctgaatgaagccataccaaacgacgagcgtgacaccacgatgcctgtagcaatggcaacaacgttgcgcaaactattaactggcgaactacttactctagcttcccggcaacaattaatagactggatggaggcggataaagttgcaggaccacttctgcgctcggcccttccggctggctggtttattgctgataaatctggagccggtgagcgtgggtctcgcggtatcattgcagcactggggccagatggtaagccctcccgtatcgtagttatctacacgacggggagtcaggcaactatggatgaacgaaatagacagatcgctgagataggtgcctcactgattaagcattggtaactgtcagaccaagtttactcatatatactttagattgatttaaaacttcatttttaatttaaaaggatctaggtgaagatcctttttgataatctcatgaccaaaatcccttaacgtgagttttcgttccactgagcgtcagaccccgtagaaaagatcaaaggatcttcttgagatcctttttttctgcgcgtaatctgctgcttgcaaacaaaaaaaccaccgctaccagcggtggtttgtttgccggatcaagagctaccaactctttttccgaaggtaactggcttcagcagagcgcagataccaaatactgttcttctagtgtagccgtagttaggccaccacttcaagaactctgtagcaccgcctacatacctcgctctgctaatcctgttaccagtggctgctgccagtggcgataagtcgtgtcttaccgggttggactcaagacgatagttaccggataaggcgcagcggtcgggctgaacggggggttcgtgcacacagcccagcttggagcgaacgacctacaccgaactgagatacctacagcgtgagctatgagaaagcgccacgcttcccgaagggagaaaggcggacaggtatccggtaagcggcagggtcggaacaggagagcgcacgagggagcttccagggggaaacgcctggtatctttatagtcctgtcgggtttcgccacctctgacttgagcgtcgatttttgtgatgctcgtcaggggggcggagcctatggaaaaacgccagcaacgcggcctttttacggttcctggccttttgctggccttttgctcacatgttctttcctgcgttatcccctgattctgtggataaccgtattaccgcctttgagtgagctgataccgctcgccgcagccgaacgaccgagcgcagcgagtcagtgagcgaggaagcggaagagcgcccaatacgcaaaccgcctctccccgcgcgttggccgattcattaatgcagctggcacgacaggtttcccgactggaaagcgggcagtgagcgcaacgcaattaatgtgagttagctcactcattaggcaccccaggctttacactttatgcttccggctcgtatgttgtgtggaattgtgagcggataacaatttcacacaggaaacagctatgaccatgattacgccagatttaattaaggccttaattagg

SEQ ID NO: 78 - DNA, 9502 bp, synthetic construct; identical to SEQ ID NO: 61
  misc_feature 1..9502: note = pVP22b-B.1.351-hextra Pro-UTR
  source 1..9502: mol_type = other DNA

SEQ ID NO: 79 - DNA, 5709 bp, synthetic construct
  misc_feature 1..5709: note = pVP27-mRNA UTR basic
  source 1..5709: mol_type = other DNA
gacggatcgggagatctcccgatcccctatggtgcactctcagtacaatctgctctgatgccgcatagttaagccagtatctgctccctgcttgtgtgttggaggtcgctgagtagtgcgcgagcaaaatttaagctacaacaaggcaaggcttgaccgacaattgcatgaagaatctgcttagggttaggcgttttgcgctgcttcgcgatgtacgggccagatatacgcgttgacattgattattgactagttattaatagtaatcaattacggggtcattagttcatagcccatatatggagttccgcgttacataacttacggtaaatggcccgcctggctgaccgcccaacgacccccgcccattgacgtcaataatgacgtatgttcccatagtaacgccaatagggactttccattgacgtcaatgggtggagtatttacggtaaactgcccacttggcagtacatcaagtgtatcatatgccaagtacgccccctattgacgtcaatgacggtaaatggcccgcctggcattatgcccagtacatgaccttatgggactttcctacttggcagtacatctacgtattagtcatcgctattaccatggtgatgcggttttggcagtacatcaatgggcgtggatagcggtttgactcacggggatttccaagtctccaccccattgacgtcaatgggagtttgttttggcaccaaaatcaacgggactttccaaaatgtcgtaacaactccgccccattgacgcaaatgggcggtaggcgtgtacggtgggaggtctatataagcagagctctctggctaactagagaacccactgcttactggcttatcgaaattaatacgactcactatagggagacccaagctggctagccaccgagaataaactagtattcttctggtccccacagactcagagagaacccgccaccatggatccgagctcggtaccaagcttaagtttctcgagctggtactgcatgcacgcaatgctagctgcccctttcccgtcctgggtaccccgagtctcccccgacctcgggtcccaggtatgctcccacctccacctgccccactcaccacctctgctagttccagacacctcccaagcacgcagcaatgcagctcaaaacgcttagcctagccacacccccacgggaaacagcagtgattaacctttagcaataaacgaaagtttaactaagctatactaaccccagggttggtcaatttcgtgccagccacaccctggagctagcaaaccgctgatcagcctcgactgtgccttctagttgccagccatctgttgtttgcccctcccccgtgccttccttgaccctggaaggtgccactcccactgtcctttcctaataaaatgaggaaattgcatcgcattgtctgagtaggtgtcattctattctggggggtggggtggggcaggacagcaagggggaggattgggaagacaatagcaggcatgctggggatgcggtgggctctatggcttctgaggcggaaagaaccagctggggctctagggggtatccccacgcgccctgtagcggcgcattaagcgcggcgggtgtggtggttacgcgcagcgtgaccgctacacttgccagcgccctagcgcccgctcctttcgctttcttcccttcctttctcgccacgttcgccggctttccccgtcaagctctaaatcgggggctccctttagggttccgatttagtgctttacggcacctcgaccccaaaaaacttgattagggtgatggttcacgtagtgggccatcgccctgatagacggtttttcgccctttgacgttggagtccacgttctttaatagtggactcttgttccaaactggaacaacactcaaccctatctcggtctattcttttgatttataagggattttgccgatttcggcctattggttaaaaaatgagctgatttaacaaaaatttaacgcgaattaattctgtggaatgtgtgtcagttagggtgtggaaagtccccaggctccccagcaggcagaagtatgcaaagcatgcatctcaattagtcagcaaccaggtgtggaaagtccccaggctccccagcaggcagaagtatgcaaagcatgcatctcaattagtcagcaaccatagtcccgcccctaactccgcccatcccgcccctaactccgcccagttccgcccattctccgccccatggctgactaattttttttatttatgcagaggccgaggccgcctctgcctctgagctattccagaagtagtgaggaggcttttttggaggcctaggcttttgcaaaaagctcccgggagcttgtatatccattttcggatctgatcaagagacaggatgaggatcgtttcgcatgattgaacaagatggattgcacgcaggttctccggccgcttgggtggagaggctattcggctatgactgggcacaacagacaatcggctgctctgatgccgccgtgttccggctgtcagcgcaggggcgcccggttctttttgtcaagaccgacctgtccggtgccctgaatgaactgcaggacgaggcagcgcggctatcgtggctggccacgacgggcgttccttgcgcagctgtgctcgacgttgtcactgaagcgggaagggactggctgctattgggcgaagtgccggggcaggatctcctgtcatctcaccttgctcctgccgagaaagtatccatcatggctgatgcaatgcggcggctgcatacgcttgatccggctacctgcccattcgaccaccaagcgaaacatcgcatcgagcgagcacgtactcggatggaagccggtcttgtcgatcaggatgatctggacgaagagcatcaggggctcgcgccagccgaactgttcgccaggctcaaggcgcgcatgcccgacggcgaggatctcgtcgtgacccatggcgatgcctgcttgccgaatatcatggtggaaaatggccgcttttctggattcatcgactgtggccggctgggtgtggcggaccgctatcaggacatagcgttggctacccgtgatattgctgaagagcttggcggcgaatgggctgaccgcttcctcgtgctttacggtatcgccgctcccgattcgcagcgcatcgccttctatcgccttcttgacgagttcttctgagcgggactctggggttcgaaatgaccgaccaagcgacgcccaacctgccatcacgagatttcgattccaccgccgccttctatgaaaggttgggcttcggaatcgttttccgggacgccggctggatgatcctccagcgcggggatctcatgctggagttcttcgcccaccccaacttgtttattgcagcttataatggttacaaataaagcaatagcatcacaaatttcacaaataaagcatttttttcactgcattctagttgtggtttgtccaaactcatcaatgtatcttatcatgtctgtataccgtcgacctctagctagagcttggcgtaatcatggtcatagctgtttcctgtgtgaaattgttatccgctcacaattccacacaacatacgagccggaagcataaagtgtaaagcctggggtgcctaatgagtgagctaactcacattaattgcgttgcgctcactgcccgctttccagtcgggaaacctgtcgtgccagctgcattaatgaatcggccaacgcgcggggagaggcggtttgcgtattgggcgctcttccgcttcctcgctcactgactcgctgcgctcggtcgttcggctgcggcgagcggtatcagctcactcaaaggcggtaatacggttatccacagaatcaggggataacgcaggaaagaacatgtgagcaaaaggccagcaaaaggccaggaaccgtaaaaaggccgcgttgctggcgtttttccataggctccgcccccctgacgagcatcacaaaaatcgacgctcaagtcagaggtggcgaaacccgacaggactataaagataccaggcgtttccccctggaagctccctcgtgcgctctcctgttccgaccctgccgcttaccggatacctgtccgcctttctcccttcgggaagcgtggcgctttctcatagctcacgctgtaggtatctcagttcggtgtaggtcgttcgctccaagctgggctgtgtgcacgaaccccccgttcagcccgaccgctgcgccttatccggtaactatcgtcttgagtccaacccggtaagacacgacttatcgccactggcagcagccactggtaacaggattagcagagcgaggtatgtaggcggtgctacagagttcttgaagtggtggcctaactacggctacactagaagaacagtatttggtatctgcgctctgctgaagccagttaccttcggaaaaagagttggtagctcttgatccggcaaacaaaccaccgctggtagcggtggtttttttgtttgcaagcagcagattacgcgcagaaaaaaaggatctcaagaagatcctttgatcttttctacggggtctgacgctcagtggaacgaaaactcacgttaagggattttggtcatgagattatcaaaaaggatcttcacctagatccttttaaattaaaaatgaagttttaaatcaatctaaagtatatatgagtaaacttggtctgacagttaccaatgcttaatcagtgaggcacctatctcagcgatctgtctatttcgttcatccatagttgcctgactccccgtcgtgtagataactacgatacgggagggcttaccatctggccccagtgctgcaatgataccgcgagacccacgctcaccggctccagatttatcagcaataaaccagccagccggaagggccgagcgcagaagtggtcctgcaactttatccgcctccatccagtctattaattgttgccgggaagctagagtaagtagttcgccagttaatagtttgcgcaacgttgttgccattgctacaggcatcgtggtgtcacgctcgtcgtttggtatggcttcattcagctccggttcccaacgatcaaggcgagttacatgatcccccatgttgtgcaaaaaagcggttagctccttcggtcctccgatcgttgtcagaagtaagttggccgcagtgttatcactcatggttatggcagcactgcataattctcttactgtcatgccatccgtaagatgcttttctgtgactggtgagtactcaaccaagtcattctgagaatagtgtatgcggcgaccgagttgctcttgcccggcgtcaatacgggataataccgcgccacatagcagaactttaaaagtgctcatcattggaaaacgttcttcggggcgaaaactctcaaggatcttaccgctgttgagatccagttcgatgtaacccactcgtgcacccaactgatcttcagcatcttttactttcaccagcgtttctgggtgagcaaaaacaggaaggcaaaatgccgcaaaaaagggaataagggcgacacggaaatgttgaatactcatactcttcctttttcaatattattgaagcatttatcagggttattgtctcatgagcggatacatatttgaatgtatttagaaaaataaacaaataggggttccgcgcacatttccccgaaaagtgccacctgacgtc

SEQ ID NO: 80 - DNA, 9499 bp, synthetic construct; identical to SEQ ID NO: 63
  misc_feature 1..9499: note = pVP29b-Indian_B.1.617_hexapro_UTR
  source 1..9499: mol_type = other DNA

SEQ ID NO: 81 - DNA, 9445 bp, synthetic construct
  misc_feature 1..9445: note = pVP33-SARS-CoV-UTR
  source 1..9445: mol_type = other DNA
gacggatcgggagatctcccgatcccctatggtgcactctcagtacaatctgctctgatgccgcatagttaagccagtatctgctccctgcttgtgtgttggaggtcgctgagtagtgcgcgagcaaaatttaagctacaacaaggcaaggcttgaccgacaattgcatgaagaatctgcttagggttaggcgttttgcgctgcttcgcgatgtacgggccagatatacgcgttgacattgattattgactagttattaatagtaatcaattacggggtcattagttcatagcccatatatggagttccgcgttacataacttacggtaaatggcccgcctggctgaccgcccaacgacccccgcccattgacgtcaataatgacgtatgttcccatagtaacgccaatagggactttccattgacgtcaatgggtggagtatttacggtaaactgcccacttggcagtacatcaagtgtatcatatgccaagtacgccccctattgacgtcaatgacggtaaatggcccgcctggcattatgcccagtacatgaccttatgggactttcctacttggcagtacatctacgtattagtcatcgctattaccatggtgatgcggttttggcagtacatcaatgggcgtggatagcggtttgactcacggggatttccaagtctccaccccattgacgtcaatgggagtttgttttggcaccaaaatcaacgggactttccaaaatgtcgtaacaactccgccccattgacgcaaatgggcggtaggcgtgtacggtgggaggtctatataagcagagctctctggctaactagagaacccactgcttactggcttatcgaaattaatacgactcactatagggagacccaagctggctagccaccgagaataaactagtattcttctggtccccacagactcagagagaacccgccaccatgttcatcttcctgctgttcctgaccctgacctctggctctgacctggacaggtgtaccacctttgatgatgtccaggctccaaactacacccaacacacctccagtatgaggggagtctactaccctgatgagattttcaggtctgacaccctctacctgacccaggacctgttcctgccattctacagcaatgtgacaggcttccacaccatcaaccacacctttgacaaccctgtgattccattcaaggatggcatctactttgctgccacagagaagagcaatgtggtgaggggctgggtgtttggcagcacaatgaacaacaagagccagtctgtgattatcatcaacaacagcaccaatgtggtgattagggcttgtaactttgaactgtgtgacaacccattctttgctgtgagcaagcctatgggcacccagacccacacaatgatttttgacaatgccttcaactgtacctttgaatacatctctgatgccttctccctggatgtgtctgagaagtctggcaacttcaaacacctgagggagtttgtgttcaagaacaaggatggcttcctctatgtctacaagggctaccaaccaattgatgtggtgagggacctgccatctggcttcaacaccctgaaaccaatcttcaaactgccactgggcatcaacatcaccaacttcagggctatcctgacagccttcagccctgcccaggacacctggggcacctctgctgctgcctactttgtgggctacctgaaaccaaccacctttatgctgaaatatgatgagaatggcaccatcacagatgctgtggactgtagccagaacccactggctgaactgaaatgttctgtgaagtcctttgagattgacaagggcatctaccagaccagcaacttcagggtggtgccatctggagatgtggtgaggtttccaaacatcaccaacctgtgtccatttggagaggtgttcaatgccaccaagtttccatctgtctatgcctgggagaggaagaagattagcaactgtgtggctgactactctgtgctctacaacagcaccttcttcagcaccttcaagtgttatggagtgtctgccaccaaactgaatgacctgtgtttcagcaatgtctatgctgactcctttgtggtgaagggagatgatgtgagacagattgcccctggacaaacaggagtgattgctgactacaactacaaactgcctgatgactttatgggctgtgtgctggcttggaacaccaggaacattgatgccaccagcacaggcaactacaactacaaatacagatacctgagacatggcaaactgagaccatttgagagggacatcagcaatgtgccattcagccctgatggcaagccatgtactcctcctgccctgaactgttactggccactgaatgactatggcttctacaccaccacaggcattggctaccaaccatacagggtggtggtgctgtcctttgaactgctgaatgcccctgccacagtgtgtggaccaaaactgagcacagacctgattaagaaccagtgtgtgaacttcaacttcaatggactgacaggcacaggagtgctgacaccatccagcaagaggttccaaccattccaacagtttggcagggatgtgtctgacttcacagactctgtgagggacccaaagacctctgagattctggacatcagcccatgttcctttggaggagtgtctgtgattacacctggcaccaatgcctcctctgaggtggctgtgctctaccaggatgtgaactgtactgatgtgagcacagccatccatgctgaccaacttacacctgcctggaggatttacagcacaggcaacaatgtgttccagacccaggctggctgtctgattggagcagagcatgtggacacctcctatgagtgtgacatcccaattggagcaggcatctgtgcctcctaccacacagtgtccctgctgaggagcaccagccagaagagcattgtggcttacacaatgagtctgggagcagactccagcattgcctacagcaacaacaccattgccatcccaaccaacttcagcatcagcatcaccacagaggtgatgcctgtgagtatggctaagacctctgtggactgtaatatgtatatctgtggagacagcacagagtgtgccaacctgctgctccaatatggctccttctgtacccaacttaacagggctctgtctggcattgctgctgaacaggacaggaacaccagggaggtgtttgcccaggtgaagcagatgtataagacaccaaccctgaaatactttggaggcttcaacttcagccagattctgcctgacccactgaaaccaaccaagaggtccttcattgaggacctgctgttcaacaaggtgaccctggctgatgctggctttatgaagcaatatggagagtgtctgggagacatcaatgccagggacctgatttgtgcccagaagttcaatggactgacagtgctgcctccactgctgacagatgatatgattgctgcctacacagcagccctggtgtctggcacagccacagcaggctggacctttggagcaggagcagccctccaaatcccatttgctatgcagatggcttacaggttcaatggcattggagtgacccagaatgtgctctatgagaaccagaagcagattgccaaccagttcaacaaggctatcagccagattcaggagtccctgaccaccaccagcacagccctgggcaaactccaagatgtggtgaaccagaatgcccaggctctgaacaccctggtgaagcaactttccagcaactttggagccatctcctctgtgctgaatgacatcctgagcagactggacaaggtggaggctgaggtccagattgacagactgattacaggcagactccaatccctccaaacctatgtgacccaacaacttatcagggctgctgagattagggcatctgccaacctggctgccaccaagatgagtgagtgtgtgctgggacaaagcaagagggtggacttctgtggcaagggctaccacctgatgagttttccacaggctgcccctcatggagtggtgttcctgcatgtgacctatgtgccaagccaggagaggaacttcaccacagcccctgccatctgccatgagggcaaggcttactttccaagggagggagtgtttgtgttcaatggcacctcctggttcatcacccagaggaacttcttcagcccacagattatcaccacagacaacacctttgtgtctggcaactgtgatgtggtgattggcatcatcaacaacacagtctatgacccactccaacctgaactggactccttcaaggaggaactggacaaatacttcaagaaccacaccagccctgatgtggacctgggagacatctctggcatcaatgcctctgtggtgaacatccagaaggagattgacagactgaatgaggtggctaagaacctgaatgagtccctgattgacctccaagaactgggcaaatatgaacaatacatcaagtggccatggtatgtgtggctgggcttcattgctggactgattgccattgtgatggtgaccatcctgctgtgttgtatgacctcctgttgttcctgtctgaaaggagcctgttcctgtggctcctgttgtaagtttgatgaggatgactctgaacctgtgctgaaaggagtgaaactgcactacacctaactcgagctggtactgcatgcacgcaatgctagctgcccctttcccgtcctgggtaccccgagtctcccccgacctcgggtcccaggtatgctcccacctccacctgccccactcaccacctctgctagttccagacacctcccaagcacgcagcaatgcagctcaaaacgcttagcctagccacacccccacgggaaacagcagtgattaacctttagcaataaacgaaagtttaactaagctatactaaccccagggttggtcaatttcgtgccagccacaccctggagctagcaaaccgctgatcagcctcgactgtgccttctagttgccagccatctgttgtttgcccctcccccgtgccttccttgaccctggaaggtgccactcccactgtcctttcctaataaaatgaggaaattgcatcgcattgtctgagtaggtgtcattctattctggggggtggggtggggcaggacagcaagggggaggattgggaagacaatagcaggcatgctggggatgcggtgggctctatggcttctgaggcggaaagaaccagctggggctctagggggtatccccacgcgccctgtagcggcgcattaagcgcggcgggtgtggtggttacgcgcagcgtgaccgctacacttgccagcgccctagcgcccgctcctttcgctttcttcccttcctttctcgccacgttcgccggctttccccgtcaagctctaaatcgggggctccctttagggttccgatttagtgctttacggcacctcgaccccaaaaaacttgattagggtgatggttcacgtagtgggccatcgccctgatagacggtttttcgccctttgacgttggagtccacgttctttaatagtggactcttgttccaaactggaacaacactcaaccctatctcggtctattcttttgatttataagggattttgccgatttcggcctattggttaaaaaatgagctgatttaacaaaaatttaacgcgaattaattctgtggaatgtgtgtcagttagggtgtggaaagtccccaggctccccagcaggcagaagtatgcaaagcatgcatctcaattagtcagcaaccaggtgtggaaagtccccaggctccccagcaggcagaagtatgcaaagcatgcatctcaattagtcagcaaccatagtcccgcccctaactccgcccatcccgcccctaactccgcccagttccgcccattctccgccccatggctgactaattttttttatttatgcagaggccgaggccgcctctgcctctgagctattccagaagtagtgaggaggcttttttggaggcctaggcttttgcaaaaagctcccgggagcttgtatatccattttcggatctgatcaagagacaggatgaggatcgtttcgcatgattgaacaagatggattgcacgcaggttctccggccgcttgggtggagaggctattcggctatgactgggcacaacagacaatcggctgctctgatgccgccgtgttccggctgtcagcgcaggggcgcccggttctttttgtcaagaccgacctgtccggtgccctgaatgaactgcaggacgaggcagcgcggctatcgtggctggccacgacgggcgttccttgcgcagctgtgctcgacgttgtcactgaagcgggaagggactggctgctattgggcgaagtgccggggcaggatctcctgtcatctcaccttgctcctgccgagaaagtatccatcatggctgatgcaatgcggcggctgcatacgcttgatccggctacctgcccattcgaccaccaagcgaaacatcgcatcgagcgagcacgtactcggatggaagccggtcttgtcgatcaggatgatctggacgaagagcatcaggggctcgcgccagccgaactgttcgccaggctcaaggcgcgcatgcccgacggcgaggatctcgtcgtgacccatggcgatgcctgcttgccgaatatcatggtggaaaatggccgcttttctggattcatcgactgtggccggctgggtgtggcggaccgctatcaggacatagcgttggctacccgtgatattgctgaagagcttggcggcgaatgggctgaccgcttcctcgtgctttacggtatcgccgctcccgattcgcagcgcatcgccttctatcgccttcttgacgagttcttctgagcgggactctggggttcgaaatgaccgaccaagcgacgcccaacctgccatcacgagatttcgattccaccgccgccttctatgaaaggttgggcttcggaatcgttttccgggacgccggctggatgatcctccagcgcggggatctcatgctggagttcttcgcccaccccaacttgtttattgcagcttataatggttacaaataaagcaatagcatcacaaatttcacaaataaagcatttttttcactgcattctagttgtggtttgtccaaactcatcaatgtatcttatcatgtctgtataccgtcgacctctagctagagcttggcgtaatcatggtcatagctgtttcctgtgtgaaattgttatccgctcacaattccacacaacatacgagccggaagcataaagtgtaaagcctggggtgcctaatgagtgagctaactcacattaattgcgttgcgctcactgcccgctttccagtcgggaaacctgtcgtgccagctgcattaatgaatcggccaacgcgcggggagaggcggtttgcgtattgggcgctcttccgcttcctcgctcactgactcgctgcgctcggtcgttcggctgcggcgagcggtatcagctcactcaaaggcggtaatacggttatccacagaatcaggggataacgcaggaaagaacatgtgagcaaaaggccagcaaaaggccaggaaccgtaaaaaggccgcgttgctggcgtttttccataggctccgcccccctgacgagcatcacaaaaatcgacgctcaagtcagaggtggcgaaacccgacaggactataaagataccaggcgtttccccctggaagctccctcgtgcgctctcctgttccgaccctgccgcttaccggatacctgtccgcctttctcccttcgggaagcgtggcgctttctcatagctcacgctgtaggtatctcagttcggtgtaggtcgttcgctccaagctgggctgtgtgcacgaaccccccgttcagcccgaccgctgcgccttatccggtaactatcgtcttgagtccaacccggtaagacacgacttatcgccactggcagcagccactggtaacaggattagcagagcgaggtatgtaggcggtgctacagagttcttgaagtggtggcctaactacggctacactagaagaacagtatttggtatctgcgctctgctgaagccagttaccttcggaaaaagagttggtagctcttgatccggcaaacaaaccaccgctggtagcggtggtttttttgtttgcaagcagcagattacgcgcagaaaaaaaggatctcaagaagatcctttgatcttttctacggggtctgacgctcagtggaacgaaaactcacgttaagggattttggtcatgagattatcaaaaaggatcttcacctagatccttttaaattaaaaatgaagttttaaatcaatctaaagtatatatgagtaaacttggtctgacagttaccaatgcttaatcagtgaggcacctatctcagcgatctgtctatttcgttcatccatagttgcctgactccccgtcgtgtagataactacgatacgggagggcttaccatctggccccagtgctgcaatgataccgcgagacccacgctcaccggctccagatttatcagcaataaaccagccagccggaagggccgagcgcagaagtggtcctgcaactttatccgcctccatccagtctattaattgttgccgggaagctagagtaagtagttcgccagttaatagtttgcgcaacgttgttgccattgctacaggcatcgtggtgtcacgctcgtcgtttggtatggcttcattcagctccggttcccaacgatcaaggcgagttacatgatcccccatgttgtgcaaaaaagcggttagctccttcggtcctccgatcgttgtcagaagtaagttggccgcagtgttatcactcatggttatggcagcactgcataattctcttactgtcatgccatccgtaagatgcttttctgtgactggtgagtactcaaccaagtcattctgagaatagtgtatgcggcgaccgagttgctcttgcccggcgtcaatacgggataataccgcgccacatagcagaactttaaaagtgctcatcattggaaaacgttcttcggggcgaaaactctcaaggatcttaccgctgttgagatccagttcgatgtaacccactcgtgcacccaactgatcttcagcatcttttactttcaccagcgtttctgggtgagcaaaaacaggaaggcaaaatgccgcaaaaaagggaataagggcgacacggaaatgttgaatactcatactcttcctttttcaatattattgaagcatttatcagggttattgtctcatgagcggatacatatttgaatgtatttagaaaaataaacaaataggggttccgcgcacatttccccgaaaagtgccacctgacgtc

SEQ ID NO: 82 - DNA, 9493 bp, synthetic construct; identical to SEQ ID NO: 42
  misc_feature 1..9493: note = pVP39_SARS-CoV-2-UTR-spike_delta_HexaPro_Circular
  source 1..9493: mol_type = other DNA

SEQ ID NO: 83 - DNA, 7879 bp, synthetic construct
  misc_feature 1..7879: note pZV01_SARS-CoV-2_UTR-Spike_WT_HexaPro_S1_SPY_catcher003
  source 1..7879: mol_type = other DNA
gacggatcgggagatctcccgatcccctatggtgcactctcagtacaatctgctctgatgccgcatagttaagccagtatctgctccctgcttgtgtgttggaggtcgctgagtagtgcgcgagcaaaatttaagctacaacaaggcaaggcttgaccgacaattgcatgaagaatctgcttagggttaggcgttttgcgctgcttcgcgatgtacgggccagatatacgcgttgacattgattattgactagttattaatagtaatcaattacggggtcattagttcatagcccatatatggagttccgcgttacataacttacggtaaatggcccgcctggctgaccgcccaacgacccccgcccattgacgtcaataatgacgtatgttcccatagtaacgccaatagggactttccattgacgtcaatgggtggagtatttacggtaaactgcccacttggcagtacatcaagtgtatcatatgccaagtacgccccctattgacgtcaatgacggtaaatggcccgcctggcattatgcccagtacatgaccttatgggactttcctacttggcagtacatctacgtattagtcatcgctattaccatggtgatgcggttttggcagtacatcaatgggcgtggatagcggtttgactcacggggatttccaagtctccaccccattgacgtcaatgggagtttgttttggcaccaaaatcaacgggactttccaaaatgtcgtaacaactccgccccattgacgcaaatgggcggtaggcgtgtacggtgggaggtctatataagcagagctctctggctaactagagaacccactgcttactggcttatcgaaattaatacgactcactatagggagacccaagctggctagccaccgagaataaactagtattcttctggtccccacagactcagagagaacccgccaccatgtttgtgttcctggtgctgctgccactggtgtccagccagtgtgtgaacctgaccaccaggacccaacttcctcctgcctacaccaactccttcaccaggggagtctactaccctgacaaggtgttcaggtcctctgtgctgcacagcacccaggacctgttcctgccattcttcagcaatgtgacctggttccatgccatccatgtgtctggcaccaatggcaccaagaggtttgacaaccctgtgctgccattcaatgatggagtctactttgccagcacagagaagagcaacatcatcaggggctggatttttggcaccaccctggacagcaagacccagtccctgctgattgtgaacaatgccaccaatgtggtgattaaggtgtgtgagttccagttctgtaatgacccattcctgggagtctactaccacaagaacaacaagtcctggatggagtctgagttcagggtctactcctctgccaacaactgtacctttgaatatgtgagccaaccattcctgatggacttggagggcaagcagggcaacttcaagaacctgagggagtttgtgttcaagaacattgatggctacttcaagatttacagcaaacacacaccaatcaacctggtgagggacctgccacagggcttctctgccttggaaccactggtggacctgccaattggcatcaacatcaccaggttccagaccctgctggctctgcacaggtcctacctgacacctggagactcctcctctggctggacagcaggagcagcagcctactatgtgggctacctccaaccaaggaccttcctgctgaaatacaatgagaatggcaccatcacagatgctgtggactgtgccctggacccactgtctgagaccaagtgtaccctgaaatccttcacagtggagaagggcatctaccagaccagcaacttcagggtccaaccaacagagagcattgtgaggtttccaaacatcaccaacctgtgtccatttggagaggtgttcaatgccaccaggtttgcctctgtctatgcctggaacaggaagaggattagcaactgtgtggctgactactctgtgctctacaactctgcctccttcagcaccttcaagtgttatggagtgagcccaaccaaactgaatgacctgtgtttcaccaatgtctatgctgactcctttgtgattaggggagatgaggtgagacagattgcccctggacaaacaggcaagattgctgactacaactacaaactgcctgatgacttcacaggctgtgtgattgcctggaacagcaacaacctggacagcaaggtgggaggcaactacaactacctctacagactgttcaggaagagcaacctgaaaccatttgagagggacatcagcacagagatttaccaggctggcagcacaccatgtaatggagtggagggcttcaactgttactttccactccaatcctatggcttccaaccaaccaatggagtgggctaccaaccatacagggtggtggtgctgtcctttgaactgctccatgcccctgccacagtgtgtggaccaaagaagagcaccaacctggtgaagaacaagtgtgtgaacttcaacttcaatggactgacaggcacaggagtgctgacagagagcaacaagaagttcctgccattccaacagtttggcagggacattgctgacaccacagatgctgtgagggacccacagaccttggagattctggacatcacaccatgttcctttggaggagtgtctgtgattacacctggcaccaacaccagcaaccaggtggctgtgctctaccaggatgtgaactgtggcgcgatggtgaccacactgtccggactgtctggagagcagggaccatccggcgacatgaccacagaggaggattctgccacacacatcaagttcagcaagagggacgaggacggaagagagctggcaggagcaaccatggagctgagggatagctccggcaagaccatcagcacatggatctccgacggccacgtgaaggatttctacctgtatcccggcaagtacacctttgtggagacagcagcaccagacggatatgaggtggcaacccctatcgagtttacagtgaacgaggacggacaggtgaccgtggatggagaggcaacagagggcgatgcacacacctgactcgagctggtactgcatgcacgcaatgctagctgcccctttcccgtcctgggtaccccgagtctcccccgacctcgggtcccaggtatgctcccacctccacctgccccactcaccacctctgctagttccagacacctcccaagcacgcagcaatgcagctcaaaacgcttagcctagccacacccccacgggaaacagcagtgattaacctttagcaataaacgaaagtttaactaagctatactaaccccagggttggtcaatttcgtgccagccacaccctggagctagcaaaccgctgatcagcctcgactgtgccttctagttgccagccatctgttgtttgcccctcccccgtgccttccttgaccctggaaggtgccactcccactgtcctttcctaataaaatgaggaaattgcatcgcattgtctgagtaggtgtcattctattctggggggtggggtggggcaggacagcaagggggaggattgggaagacaatagcaggcatgctggggatgcggtgggctctatggcttctgaggcggaaagaaccagctggggctctagggggtatccccacgcgccctgtagcggcgcattaagcgcggcgggtgtggtggttacgcgcagcgtgaccgctacacttgccagcgccctagcgcccgctcctttcgctttcttcccttcctttctcgccacgttcgccggctttccccgtcaagctctaaatcgggggctccctttagggttccgatttagtgctttacggcacctcgaccccaaaaaacttgattagggtgatggttcacgtagtgggccatcgccctgatagacggtttttcgccctttgacgttggagtccacgttctttaatagtggactcttgttccaaactggaacaacactcaaccctatctcggtctattcttttgatttataagggattttgccgatttcggcctattggttaaaaaatgagctgatttaacaaaaatttaacgcgaattaattctgtggaatgtgtgtcagttagggtgtggaaagtccccaggctccccagcaggcagaagtatgcaaagcatgcatctcaattagtcagcaaccaggtgtggaaagtccccaggctccccagcaggcagaagtatgcaaagcatgcatctcaattagtcagcaaccatagtcccgcccctaactccgcccatcccgcccctaactccgcccagttccgcccattctccgccccatggctgactaattttttttatttatgcagaggccgaggccgcctctgcctctgagctattccagaagtagtgaggaggcttttttggaggcctaggcttttgcaaaaagctcccgggagcttgtatatccattttcggatctgatcaagagacaggatgaggatcgtttcgcatgattgaacaagatggattgcacgcaggttctccggccgcttgggtggagaggctattcggctatgactgggcacaacagacaatcggctgctctgatgccgccgtgttccggctgtcagcgcaggggcgcccggttctttttgtcaagaccgacctgtccggtgccctgaatgaactgcaggacgaggcagcgcggctatcgtggctggccacgacgggcgttccttgcgcagctgtgctcgacgttgtcactgaagcgggaagggactggctgctattgggcgaagtgccggggcaggatctcctgtcatctcaccttgctcctgccgagaaagtatccatcatggctgatgcaatgcggcggctgcatacgcttgatccggctacctgcccattcgaccaccaagcgaaacatcgcatcgagcgagcacgtactcggatggaagccggtcttgtcgatcaggatgatctggacgaagagcatcaggggctcgcgccagccgaactgttcgccaggctcaaggcgcgcatgcccgacggcgaggatctcgtcgtgacccatggcgatgcctgcttgccgaatatcatggtggaaaatggccgcttttctggattcatcgactgtggccggctgggtgtggcggaccgctatcaggacatagcgttggctacccgtgatattgctgaagagcttggcggcgaatgggctgaccgcttcctcgtgctttacggtatcgccgctcccgattcgcagcgcatcgccttctatcgccttcttgacgagttcttctgagcgggactctggggttcgaaatgaccgaccaagcgacgcccaacctgccatcacgagatttcgattccaccgccgccttctatgaaaggttgggcttcggaatcgttttccgggacgccggctggatgatcctccagcgcggggatctcatgctggagttcttcgcccaccccaacttgtttattgcagcttataatggttacaaataaagcaatagcatcacaaatttcacaaataaagcatttttttcactgcattctagttgtggtttgtccaaactcatcaatgtatcttatcatgtctgtataccgtcgacctctagctagagcttggcgtaatcatggtcatagctgtttcctgtgtgaaattgttatccgctcacaattccacacaacatacgagccggaagcataaagtgtaaagcctggggtgcctaatgagtgagctaactcacattaattgcgttgcgctcactgcccgctttccagtcgggaaacctgtcgtgccagctgcattaatgaatcggccaacgcgcggggagaggcggtttgcgtattgggcgctcttccgcttcctcgctcactgactcgctgcgctcggtcgttcggctgcggcgagcggtatcagctcactcaaaggcggtaatacggttatccacagaatcaggggataacgcaggaaagaacatgtgagcaaaaggccagcaaaaggccaggaaccgtaaaaaggccgcgttgctggcgtttttccataggctccgcccccctgacgagcatcacaaaaatcgacgctcaagtcagaggtggcgaaacccgacaggactataaagataccaggcgtttccccctggaagctccctcgtgcgctctcctgttccgaccctgccgcttaccggatacctgtccgcctttctcccttcgggaagcgtggcgctttctcatagctcacgctgtaggtatctcagttcggtgtaggtcgttcgctccaagctgggctgtgtgcacgaaccccccgttcagcccgaccgctgcgccttatccggtaactatcgtcttgagtccaacccggtaagacacgacttatcgccactggcagcagccactggtaacaggattagcagagcgaggtatgtaggcggtgctacagagttcttgaagtggtggcctaactacggctacactagaagaacagtatttggtatctgcgctctgctgaagccagttaccttcggaaaaagagttggtagctcttgatccggcaaacaaaccaccgctggtagcggtggtttttttgtttgcaagcagcagattacgcgcagaaaaaaaggatctcaagaagatcctttgatcttttctacggggtctgacgctcagtggaacgaaaactcacgttaagggattttggtcatgagattatcaaaaaggatcttcacctagatccttttaaattaaaaatgaagttttaaatcaatctaaagtatatatgagtaaacttggtctgacagttaccaatgcttaatcagtgaggcacctatctcagcgatctgtctatttcgttcatccatagttgcctgactccccgtcgtgtagataactacgatacgggagggcttaccatctggccccagtgctgcaatgataccgcgagacccacgctcaccggctccagatttatcagcaataaaccagccagccggaagggccgagcgcagaagtggtcctgcaactttatccgcctccatccagtctattaattgttgccgggaagctagagtaagtagttcgccagttaatagtttgcgcaacgttgttgccattgctacaggcatcgtggtgtcacgctcgtcgtttggtatggcttcattcagctccggttcccaacgatcaaggcgagttacatgatcccccatgttgtgcaaaaaagcggttagctccttcggtcctccgatcgttgtcagaagtaagttggccgcagtgttatcactcatggttatggcagcactgcataattctcttactgtcatgccatccgtaagatgcttttctgtgactggtgagtactcaaccaagtcattctgagaatagtgtatgcggcgaccgagttgctcttgcccggcgtcaatacgggataataccgcgccacatagcagaactttaaaagtgctcatcattggaaaacgttcttcggggcgaaaactctcaaggatcttaccgctgttgagatccagttcgatgtaacccactcgtgcacccaactgatcttcagcatcttttactttcaccagcgtttctgggtgagcaaaaacaggaaggcaaaatgccgcaaaaaagggaataagggcgacacggaaatgttgaatactcatactcttcctttttcaatattattgaagcatttatcagggttattgtctcatgagcggatacatatttgaatgtatttagaaaaataaacaaataggggttccgcgcacatttccccgaaaagtgccacctgacgtc

SEQ ID NO: 84 - DNA, 7702 bp, synthetic construct
  misc_feature 1..7702: note = pZV02_SARS-CoV-2_UTR-Spike_WT_hexapro_SPY_tag003_S2
  source 1..7702: mol_type = other DNA
gacggatcgggagatctcccgatcccctatggtgcactctcagtacaatctgctctgatgccgcatagttaagccagtatctgctccctgcttgtgtgttggaggtcgctgagtagtgcgcgagcaaaatttaagctacaacaaggcaaggcttgaccgacaattgcatgaagaatctgcttagggttaggcgttttgcgctgcttcgcgatgtacgggccagatatacgcgttgacattgattattgactagttattaatagtaatcaattacggggtcattagttcatagcccatatatggagttccgcgttacataacttacggtaaatggcccgcctggctgaccgcccaacgacccccgcccattgacgtcaataatgacgtatgttcccatagtaacgccaatagggactttccattgacgtcaatgggtggagtatttacggtaaactgcccacttggcagtacatcaagtgtatcatatgccaagtacgccccctattgacgtcaatgacggtaaatggcccgcctggcattatgcccagtacatgaccttatgggactttcctacttggcagtacatctacgtattagtcatcgctattaccatggtgatgcggttttggcagtacatcaatgggcgtggatagcggtttgactcacggggatttccaagtctccaccccattgacgtcaatgggagtttgttttggcaccaaaatcaacgggactttccaaaatgtcgtaacaactccgccccattgacgcaaatgggcggtaggcgtgtacggtgggaggtctatataagcagagctctctggctaactagagaacccactgcttactggcttatcgaaattaatacgactcactatagggagacccaagctggctagccaccgagaataaactagtattcttctggtccccacagactcagagagaacccgccaccatgggccgtggcgtgcctcatatcgtgatggtggacgcctacaagcgttacaagactgaggtgcctgtggctatccatgctgaccaacttacaccaacctggagggtctacagcacaggcagcaatgtgttccagaccagggctggctgtctgattggagcagagcatgtgaacaactcctatgagtgtgacatcccaattggagcaggcatctgtgcctcctaccagacccagaccaacagcccaggctctgcatcttctgtggcaagccagagcatcattgcctacacaatgagtctgggagcagagaactctgtggcttacagcaacaacagcattgccatcccaaccaacttcaccatctctgtgaccacagagattctgcctgtgagtatgaccaagacctctgtggactgtacaatgtatatctgtggagacagcacagagtgtagcaacctgctgctccaatatggctccttctgtacccaacttaacagggctctgacaggcattgctgtggaacaggacaagaacacccaggaggtgtttgcccaggtgaagcagatttacaagacacctccaatcaaggactttggaggcttcaacttcagccagattctgcctgacccaagcaagccaagcaagaggtcccctattgaggacctgctgttcaacaaggtgaccctggctgatgctggcttcatcaagcaatatggagactgtctgggagacattgctgccagggacctgatttgtgcccagaagttcaatggactgacagtgctgcctccactgctgacagatgagatgattgcccaatacacctctgccctgctggctggcaccatcacctctggctggacctttggagcaggaccagccctccaaatcccatttccaatgcagatggcttacaggttcaatggcattggagtgacccagaatgtgctctatgagaaccagaaactgattgccaaccagttcaactctgccattggcaagattcaggactccctgtccagcacaccatctgccctgggcaaactccaagatgtggtgaaccagaatgcccaggctctgaacaccctggtgaagcaactttccagcaactttggagccatctcctctgtgctgaatgacatcctgagcagactggacccaccagaggctgaggtccagattgacagactgattacaggcagactccaatccctccaaacctatgtgacccaacaacttatcagggctgctgagattagggcatctgccaacctggctgccaccaagatgagtgagtgtgtgctgggacaaagcaagagggtggacttctgtggcaagggctaccacctgatgagttttccacagtctgcccctcatggagtggtgttcctgcatgtgacctatgtgcctgcccaggagaagaacttcaccacagcccctgccatctgccatgatggcaaggctcactttccaagggagggagtgtttgtgagcaatggcacccactggtttgtgacccagaggaacttctatgaaccacagattatcaccacagacaacacctttgtgtctggcaactgtgatgtggtgattggcattgtgaacaacacagtctatgacccactccaacctgaactggactccttcaaggaggaactggacaaatacttcaagaaccacaccagccctgatgtggacctgggagacatctctggcatcaatgcctctgtggtgaacatccagaaggagattgacagactgaatgaggtggctaagaacctgaatgagtccctgattgacctccaagaactgggcaaatatgaacaatacatcaagtggccatggtacatctggctgggcttcattgctggactgattgccattgtgatggtgaccataatgctgtgttgtatgacctcctgttgttcctgtctgaaaggctgttgttcctgtggctcctgttgtaagtttgatgaggatgactctgaacctgtgctgaaaggagtgaaactgcactacacctgactcgagctggtactgcatgcacgcaatgctagctgcccctttcccgtcctgggtaccccgagtctcccccgacctcgggtcccaggtatgctcccacctccacctgccccactcaccacctctgctagttccagacacctcccaagcacgcagcaatgcagctcaaaacgcttagcctagccacacccccacgggaaacagcagtgattaacctttagcaataaacgaaagtttaactaagctatactaaccccagggttggtcaatttcgtgccagccacaccctggagctagcaaaccgctgatcagcctcgactgtgccttctagttgccagccatctgttgtttgcccctcccccgtgccttccttgaccctggaaggtgccactcccactgtcctttcctaataaaatgaggaaattgcatcgcattgtctgagtaggtgtcattctattctggggggtggggtggggcaggacagcaagggggaggattgggaagacaatagcaggcatgctggggatgcggtgggctctatggcttctgaggcggaaagaaccagctggggctctagggggtatccccacgcgccctgtagcggcgcattaagcgcggcgggtgtggtggttacgcgcagcgtgaccgctacacttgccagcgccctagcgcccgctcctttcgctttcttcccttcctttctcgccacgttcgccggctttccccgtcaagctctaaatcgggggctccctttagggttccgatttagtgctttacggcacctcgaccccaaaaaacttgattagggtgatggttcacgtagtgggccatcgccctgatagacggtttttcgccctttgacgttggagtccacgttctttaatagtggactcttgttccaaactggaacaacactcaaccctatctcggtctattcttttgatttataagggattttgccgatttcggcctattggttaaaaaatgagctgatttaacaaaaatttaacgcgaattaattctgtggaatgtgtgtcagttagggtgtggaaagtccccaggctccccagcaggcagaagtatgcaaagcatgcatctcaattagtcagcaaccaggtgtggaaagtccccaggctccccagcaggcagaagtatgcaaagcatgcatctcaattagtcagcaaccatagtcccgcccctaactccgcccatcccgcccctaactccgcccagttccgcccattctccgccccatggctgactaattttttttatttatgcagaggccgaggccgcctctgcctctgagctattccagaagtagtgaggaggcttttttggaggcctaggcttttgcaaaaagctcccgggagcttgtatatccattttcggatctgatcaagagacaggatgaggatcgtttcgcatgattgaacaagatggattgcacgcaggttctccggccgcttgggtggagaggctattcggctatgactgggcacaacagacaatcggctgctctgatgccgccgtgttccggctgtcagcgcaggggcgcccggttctttttgtcaagaccgacctgtccggtgccctgaatgaactgcaggacgaggcagcgcggctatcgtggctggccacgacgggcgttccttgcgcagctgtgctcgacgttgtcactgaagcgggaagggactggctgctattgggcgaagtgccggggcaggatctcctgtcatctcaccttgctcctgccgagaaagtatccatcatggctgatgcaatgcggcggctgcatacgcttgatccggctacctgcccattcgaccaccaagcgaaacatcgcatcgagcgagcacgtactcggatggaagccggtcttgtcgatcaggatgatctggacgaagagcatcaggggctcgcgccagccgaactgttcgccaggctcaaggcgcgcatgcccgacggcgaggatctcgtcgtgacccatggcgatgcctgcttgccgaatatcatggtggaaaatggccgcttttctggattcatcgactgtggccggctgggtgtggcggaccgctatcaggacatagcgttggctacccgtgatattgctgaagagcttggcggcgaatgggctgaccgcttcctcgtgctttacggtatcgccgctcccgattcgcagcgcatcgccttctatcgccttcttgacgagttcttctgagcgggactctggggttcgaaatgaccgaccaagcgacgcccaacctgccatcacgagatttcgattccaccgccgccttctatgaaaggttgggcttcggaatcgttttccgggacgccggctggatgatcctccagcgcggggatctcatgctggagttcttcgcccaccccaacttgtttattgcagcttataatggttacaaataaagcaatagcatcacaaatttcacaaataaagcatttttttcactgcattctagttgtggtttgtccaaactcatcaatgtatcttatcatgtctgtataccgtcgacctctagctagagcttggcgtaatcatggtcatagctgtttcctgtgtgaaattgttatccgctcacaattccacacaacatacgagccggaagcataaagtgtaaagcctggggtgcctaatgagtgagctaactcacattaattgcgttgcgctcactgcccgctttccagtcgggaaacctgtcgtgccagctgcattaatgaatcggccaacgcgcggggagaggcggtttgcgtattgggcgctcttccgcttcctcgctcactgactcgctgcgctcggtcgttcggctgcggcgagcggtatcagctcactcaaaggcggtaatacggttatccacagaatcaggggataacgcaggaaagaacatgtgagcaaaaggccagcaaaaggccaggaaccgtaaaaaggccgcgttgctggcgtttttccataggctccgcccccctgacgagcatcacaaaaatcgacgctcaagtcagaggtggcgaaacccgacaggactataaagataccaggcgtttccccctggaagctccctcgtgcgctctcctgttccgaccctgccgcttaccggatacctgtccgcctttctcccttcgggaagcgtggcgctttctcatagctcacgctgtaggtatctcagttcggtgtaggtcgttcgctccaagctgggctgtgtgcacgaaccccccgttcagcccgaccgctgcgccttatccggtaactatcgtcttgagtccaacccggtaagacacgacttatcgccactggcagcagccactggtaacaggattagcagagcgaggtatgtaggcggtgctacagagttcttgaagtggtggcctaactacggctacactagaagaacagtatttggtatctgcgctctgctgaagccagttaccttcggaaaaagagttggtagctcttgatccggcaaacaaaccaccgctggtagcggtggtttttttgtttgcaagcagcagattacgcgcagaaaaaaaggatctcaagaagatcctttgatcttttctacggggtctgacgctcagtggaacgaaaactcacgttaagggattttggtcatgagattatcaaaaaggatcttcacctagatccttttaaattaaaaatgaagttttaaatcaatctaaagtatatatgagtaaacttggtctgacagttaccaatgcttaatcagtgaggcacctatctcagcgatctgtctatttcgttcatccatagttgcctgactccccgtcgtgtagataactacgatacgggagggcttaccatctggccccagtgctgcaatgataccgcgagacccacgctcaccggctccagatttatcagcaataaaccagccagccggaagggccgagcgcagaagtggtcctgcaactttatccgcctccatccagtctattaattgttgccgggaagctagagtaagtagttcgccagttaatagtttgcgcaacgttgttgccattgctacaggcatcgtggtgtcacgctcgtcgtttggtatggcttcattcagctccggttcccaacgatcaaggcgagttacatgatcccccatgttgtgcaaaaaagcggttagctccttcggtcctccgatcgttgtcagaagtaagttggccgcagtgttatcactcatggttatggcagcactgcataattctcttactgtcatgccatccgtaagatgcttttctgtgactggtgagtactcaaccaagtcattctgagaatagtgtatgcggcgaccgagttgctcttgcccggcgtcaatacgggataataccgcgccacatagcagaactttaaaagtgctcatcattggaaaacgttcttcggggcgaaaactctcaaggatcttaccgctgttgagatccagttcgatgtaacccactcgtgcacccaactgatcttcagcatcttttactttcaccagcgtttctgggtgagcaaaaacaggaaggcaaaatgccgcaaaaaagggaataagggcgacacggaaatgttgaatactcatactcttcctttttcaatattattgaagcatttatcagggttattgtctcatgagcggatacatatttgaatgtatttagaaaaataaacaaataggggttccgcgcacatttccccgaaaagtgccacctgacgtc

SEQ ID NO: 85 - DNA, 7777 bp, synthetic construct
  misc_feature 1..7777: note pZV03_SARS-CoV-2-UTR-spike_delta_HexaPro_S1_S683_furin_SPY_ tag
  source 1..7777: mol_type = other DNA
gacggatcgggagatctcccgatcccctatggtgcactctcagtacaatctgctctgatgccgcatagttaagccagtatctgctccctgcttgtgtgttggaggtcgctgagtagtgcgcgagcaaaatttaagctacaacaaggcaaggcttgaccgacaattgcatgaagaatctgcttagggttaggcgttttgcgctgcttcgcgatgtacgggccagatatacgcgttgacattgattattgactagttattaatagtaatcaattacggggtcattagttcatagcccatatatggagttccgcgttacataacttacggtaaatggcccgcctggctgaccgcccaacgacccccgcccattgacgtcaataatgacgtatgttcccatagtaacgccaatagggactttccattgacgtcaatgggtggagtatttacggtaaactgcccacttggcagtacatcaagtgtatcatatgccaagtacgccccctattgacgtcaatgacggtaaatggcccgcctggcattatgcccagtacatgaccttatgggactttcctacttggcagtacatctacgtattagtcatcgctattaccatggtgatgcggttttggcagtacatcaatgggcgtggatagcggtttgactcacggggatttccaagtctccaccccattgacgtcaatgggagtttgttttggcaccaaaatcaacgggactttccaaaatgtcgtaacaactccgccccattgacgcaaatgggcggtaggcgtgtacggtgggaggtctatataagcagagctctctggctaactagagaacccactgcttactggcttatcgaaattaatacgactcactatagggagacccaagctggctagccaccgagaataaactagtattcttctggtccccacagactcagagagaacccgccaccatgtttgtgttcctggtgctgctgccactggtgtccagccagtgtgtgaacctgaggaccaggacccaacttcctcctgcctacaccaactccttcaccaggggagtctactaccctgacaaggtgttcaggtcctctgtgctgcacagcacccaggacctgttcctgccattcttcagcaatgtgacctggttccatgccatccatgtgtctggcaccaatggcaccaagaggtttgacaaccctgtgctgccattcaatgatggagtctactttgccagcacagagaagagcaacatcatcaggggctggatttttggcaccaccctggacagcaagacccagtccctgctgattgtgaacaatgccaccaatgtggtgattaaggtgtgtgagttccagttctgtaatgacccattcctggacgtctactaccacaagaacaacaagtcctggatggagtctggcgtctactcctctgccaacaactgtacctttgaatatgtgagccaaccattcctgatggacttggagggcaagcagggcaacttcaagaacctgagggagtttgtgttcaagaacattgatggctacttcaagatttacagcaaacacacaccaatcaacctggtgagggacctgccacagggcttctctgccttggaaccactggtggacctgccaattggcatcaacatcaccaggttccagaccctgctggctctgcacaggtcctacctgacacctggagactcctcctctggctggacagcaggagcagcagcctactatgtgggctacctccaaccaaggaccttcctgctgaaatacaatgagaatggcaccatcacagatgctgtggactgtgccctggacccactgtctgagaccaagtgtaccctgaaatccttcacagtggagaagggcatctaccagaccagcaacttcagggtccaaccaacagagagcattgtgaggtttccaaacatcaccaacctgtgtccatttggagaggtgttcaatgccaccaggtttgcctctgtctatgcctggaacaggaagaggattagcaactgtgtggctgactactctgtgctctacaactctgcctccttcagcaccttcaagtgttatggagtgagcccaaccaaactgaatgacctgtgtttcaccaatgtctatgctgactcctttgtgattaggggagatgaggtgagacagattgcccctggacaaacaggcaagattgctgactacaactacaaactgcctgatgacttcacaggctgtgtgattgcctggaacagcaacaacctggacagcaaggtgggaggcaactacaactacaggtacagactgttcaggaagagcaacctgaaaccatttgagagggacatcagcacagagatttaccaggctggcagcaagccatgtaatggagtggagggcttcaactgttactttccactccaatcctatggcttccaaccaaccaatggagtgggctaccaaccatacagggtggtggtgctgtcctttgaactgctccatgcccctgccacagtgtgtggaccaaagaagagcaccaacctggtgaagaacaagtgtgtgaacttcaacttcaatggactgacaggcacaggagtgctgacagagagcaacaagaagttcctgccattccaacagtttggcagggacattgctgacaccacagatgctgtgagggacccacagaccttggagattctggacatcacaccatgttcctttggaggagtgtctgtgattacacctggcaccaacaccagcaaccaggtggctgtgctctaccagggcgtgaactgtactgaggtgcctgtggctatccatgctgaccaacttacaccaacctggagggtctacagcacaggaagcaacgtgttccagaccagggctggctgtctgattggagcagagcatgtgaacaactcctatgagtgtgacatcccaattggagcaggcatctgtgcctcctaccagacccagaccaacagcaggggctctgcatctcgtggcgtgcctcatatcgtgatggtggacgcctacaagcgttacaagtgactcgagctggtactgcatgcacgcaatgctagctgcccctttcccgtcctgggtaccccgagtctcccccgacctcgggtcccaggtatgctcccacctccacctgccccactcaccacctctgctagttccagacacctcccaagcacgcagcaatgcagctcaaaacgcttagcctagccacacccccacgggaaacagcagtgattaacctttagcaataaacgaaagtttaactaagctatactaaccccagggttggtcaatttcgtgccagccacaccctggagctagcaaaccgctgatcagcctcgactgtgccttctagttgccagccatctgttgtttgcccctcccccgtgccttccttgaccctggaaggtgccactcccactgtcctttcctaataaaatgaggaaattgcatcgcattgtctgagtaggtgtcattctattctggggggtggggtggggcaggacagcaagggggaggattgggaagacaatagcaggcatgctggggatgcggtgggctctatggcttctgaggcggaaagaaccagctggggctctagggggtatccccacgcgccctgtagcggcgcattaagcgcggcgggtgtggtggttacgcgcagcgtgaccgctacacttgccagcgccctagcgcccgctcctttcgctttcttcccttcctttctcgccacgttcgccggctttccccgtcaagctctaaatcgggggctccctttagggttccgatttagtgctttacggcacctcgaccccaaaaaacttgattagggtgatggttcacgtagtgggccatcgccctgatagacggtttttcgccctttgacgttggagtccacgttctttaatagtggactcttgttccaaactggaacaacactcaaccctatctcggtctattcttttgatttataagggattttgccgatttcggcctattggttaaaaaatgagctgatttaacaaaaatttaacgcgaattaattctgtggaatgtgtgtcagttagggtgtggaaagtccccaggctccccagcaggcagaagtatgcaaagcatgcatctcaattagtcagcaaccaggtgtggaaagtccccaggctccccagcaggcagaagtatgcaaagcatgcatctcaattagtcagcaaccatagtcccgcccctaactccgcccatcccgcccctaactccgcccagttccgcccattctccgccccatggctgactaattttttttatttatgcagaggccgaggccgcctctgcctctgagctattccagaagtagtgaggaggcttttttggaggcctaggcttttgcaaaaagctcccgggagcttgtatatccattttcggatctgatcaagagacaggatgaggatcgtttcgcatgattgaacaagatggattgcacgcaggttctccggccgcttgggtggagaggctattcggctatgactgggcacaacagacaatcggctgctctgatgccgccgtgttccggctgtcagcgcaggggcgcccggttctttttgtcaagaccgacctgtccggtgccctgaatgaactgcaggacgaggcagcgcggctatcgtggctggccacgacgggcgttccttgcgcagctgtgctcgacgttgtcactgaagcgggaagggactggctgctattgggcgaagtgccggggcaggatctcctgtcatctcaccttgctcctgccgagaaagtatccatcatggctgatgcaatgcggcggctgcatacgcttgatccggctacctgcccattcgaccaccaagcgaaacatcgcatcgagcgagcacgtactcggatggaagccggtcttgtcgatcaggatgatctggacgaagagcatcaggggctcgcgccagccgaactgttcgccaggctcaaggcgcgcatgcccgacggcgaggatctcgtcgtgacccatggcgatgcctgcttgccgaatatcatggtggaaaatggccgcttttctggattcatcgactgtggccggctgggtgtggcggaccgctatcaggacatagcgttggctacccgtgatattgctgaagagcttggcggcgaatgggctgaccgcttcctcgtgctttacggtatcgccgctcccgattcgcagcgcatcgccttctatcgccttcttgacgagttcttctgagcgggactctggggttcgaaatgaccgaccaagcgacgcccaacctgccatcacgagatttcgattccaccgccgccttctatgaaaggttgggcttcggaatcgttttccgggacgccggctggatgatcctccagcgcggggatctcatgctggagttcttcgcccaccccaacttgtttattgcagcttataatggttacaaataaagcaatagcatcacaaatttcacaaataaagcatttttttcactgcattctagttgtggtttgtccaaactcatcaatgtatcttatcatgtctgtataccgtcgacctctagctagagcttggcgtaatcatggtcatagctgtttcctgtgtgaaattgttatccgctcacaattccacacaacatacgagccggaagcataaagtgtaaagcctggggtgcctaatgagtgagctaactcacattaattgcgttgcgctcactgcccgctttccagtcgggaaacctgtcgtgccagctgcattaatgaatcggccaacgcgcggggagaggcggtttgcgtattgggcgctcttccgcttcctcgctcactgactcgctgcgctcggtcgttcggctgcggcgagcggtatcagctcactcaaaggcggtaatacggttatccacagaatcaggggataacgcaggaaagaacatgtgagcaaaaggccagcaaaaggccaggaaccgtaaaaaggccgcgttgctggcgtttttccataggctccgcccccctgacgagcatcacaaaaatcgacgctcaagtcagaggtggcgaaacccgacaggactataaagataccaggcgtttccccctggaagctccctcgtgcgctctcctgttccgaccctgccgcttaccggatacctgtccgcctttctcccttcgggaagcgtggcgctttctcatagctcacgctgtaggtatctcagttcggtgtaggtcgttcgctccaagctgggctgtgtgcacgaaccccccgttcagcccgaccgctgcgccttatccggtaactatcgtcttgagtccaacccggtaagacacgacttatcgccactggcagcagccactggtaacaggattagcagagcgaggtatgtaggcggtgctacagagttcttgaagtggtggcctaactacggctacactagaagaacagtatttggtatctgcgctctgctgaagccagttaccttcggaaaaagagttggtagctcttgatccggcaaacaaaccaccgctggtagcggtggtttttttgtttgcaagcagcagattacgcgcagaaaaaaaggatctcaagaagatcctttgatcttttctacggggtctgacgctcagtggaacgaaaactcacgttaagggattttggtcatgagattatcaaaaaggatcttcacctagatccttttaaattaaaaatgaagttttaaatcaatctaaagtatatatgagtaaacttggtctgacagttaccaatgcttaatcagtgaggcacctatctcagcgatctgtctatttcgttcatccatagttgcctgactccccgtcgtgtagataactacgatacgggagggcttaccatctggccccagtgctgcaatgataccgcgagacccacgctcaccggctccagatttatcagcaataaaccagccagccggaagggccgagcgcagaagtggtcctgcaactttatccgcctccatccagtctattaattgttgccgggaagctagagtaagtagttcgccagttaatagtttgcgcaacgttgttgccattgctacaggcatcgtggtgtcacgctcgtcgtttggtatggcttcattcagctccggttcccaacgatcaaggcgagttacatgatcccccatgttgtgcaaaaaagcggttagctccttcggtcctccgatcgttgtcagaagtaagttggccgcagtgttatcactcatggttatggcagcactgcataattctcttactgtcatgccatccgtaagatgcttttctgtgactggtgagtactcaaccaagtcattctgagaatagtgtatgcggcgaccgagttgctcttgcccggcgtcaatacgggataataccgcgccacatagcagaactttaaaagtgctcatcattggaaaacgttcttcggggcgaaaactctcaaggatcttaccgctgttgagatccagttcgatgtaacccactcgtgcacccaactgatcttcagcatcttttactttcaccagcgtttctgggtgagcaaaaacaggaaggcaaaatgccgcaaaaaagggaataagggcgacacggaaatgttgaatactcatactcttcctttttcaatattattgaagcatttatcagggttattgtctcatgagcggatacatatttgaatgtatttagaaaaataaacaaataggggttccgcgcacatttccccgaaaagtgccacctgacgtc

SEQ ID NO: 86 - DNA, 7831 bp, synthetic construct
  misc_feature 1..7831: note pZV04_SARS-CoV-2-UTR-spike_delta_HexaPro_SPY_catcher_S684_S 2
  source 1..7831: mol_type = other DNA
gacggatcgggagatctcccgatcccctatggtgcactctcagtacaatctgctctgatgccgcatagttaagccagtatctgctccctgcttgtgtgttggaggtcgctgagtagtgcgcgagcaaaatttaagctacaacaaggcaaggcttgaccgacaattgcatgaagaatctgcttagggttaggcgttttgcgctgcttcgcgatgtacgggccagatatacgcgttgacattgattattgactagttattaatagtaatcaattacggggtcattagttcatagcccatatatggagttccgcgttacataacttacggtaaatggcccgcctggctgaccgcccaacgacccccgcccattgacgtcaataatgacgtatgttcccatagtaacgccaatagggactttccattgacgtcaatgggtggagtatttacggtaaactgcccacttggcagtacatcaagtgtatcatatgccaagtacgccccctattgacgtcaatgacggtaaatggcccgcctggcattatgcccagtacatgaccttatgggactttcctacttggcagtacatctacgtattagtcatcgctattaccatggtgatgcggttttggcagtacatcaatgggcgtggatagcggtttgactcacggggatttccaagtctccaccccattgacgtcaatgggagtttgttttggcaccaaaatcaacgggactttccaaaatgtcgtaacaactccgccccattgacgcaaatgggcggtaggcgtgtacggtgggaggtctatataagcagagctctctggctaactagagaacccactgcttactggcttatcgaaattaatacgactcactatagggagacccaagctggctagccaccgagaataaactagtattcttctggtccccacagactcagagagaacccgccaccatgtttgtgttcctggtgctgctgccactggtgtccagcgtgaccacactgtccggactgtctggagagcagggaccatccggcgacatgaccacagaggaggattctgccacacacatcaagttcagcaagagggacgaggacggaagagagctggcaggagcaaccatggagctgagggatagctccggcaagaccatcagcacatggatctccgacggccacgtgaaggatttctacctgtatcccggcaagtacacctttgtggagacagcagcaccagacggatatgaggtggcaacccctatcgagtttacagtgaacgaggacggacaggtgaccgtggatggagaggcaacagagggcgatgcacacaccggcagcagctctgtggcaagccagagcatcattgcctacacaatgagtctgggagcagagaactctgtggcttacagcaacaacagcattgccatcccaaccaacttcaccatctctgtgaccacagagattctgcctgtgagtatgaccaagacctctgtggactgtacaatgtatatctgtggagacagcacagagtgtagcaacctgctgctccaatatggctccttctgtacccaacttaacagggctctgacaggcattgctgtggaacaggacaagaacacccaggaggtgtttgcccaggtgaagcagatttacaagacacctccaatcaaggactttggaggcttcaacttcagccagattctgcctgacccaagcaagccaagcaagaggtcccctattgaggacctgctgttcaacaaggtgaccctggctgatgctggcttcatcaagcaatatggagactgtctgggagacattgccgccagggacctgatttgtgcccagaagttcaatggactgacagtgctgcctccactgctgacagatgagatgattgcccaatacacctctgccctgctggctggcaccatcacctctggctggacctttggagcaggaccagccctccaaatcccatttccaatgcagatggcttacaggttcaatggcattggagtgacccagaatgtgctctatgagaaccagaaactgattgccaaccagttcaactctgccattggcaagattcaggactccctgtccagcacaccatctgccctgggcaaactccaaaacgtggtgaaccagaatgcccaggctctgaacaccctggtgaagcaactttccagcaactttggagccatctcctctgtgctgaatgacatcctgagcagactggacccaccagaggctgaggtccagattgacagactgattacaggcagactccaatccctccaaacctatgtgacccaacaacttatcagggctgctgagattagggcatctgccaacctggctgccaccaagatgagtgagtgtgtgctgggacaaagcaagagggtggacttctgtggcaagggctaccacctgatgagttttccacagtctgcccctcatggagtggtgttcctgcatgtgacctatgtgcctgcccaggagaagaacttcaccacagcccctgccatctgccatgatggcaaggctcactttccaagggagggagtgtttgtgagcaatggcacccactggtttgtgacccagaggaacttctatgaaccacagattatcaccacagacaacacctttgtgtctggcaactgtgatgtggtgattggcattgtgaacaacacagtctatgacccactccaacctgaactggactccttcaaggaggaactggacaaatacttcaagaaccacaccagccctgatgtggacctgggagacatctctggcatcaatgcctctgtggtgaacatccagaaggagattgacagactgaatgaggtggctaagaacctgaatgagtccctgattgacctccaagaactgggcaaatatgaacaatacatcaagtggccatggtacatctggctgggcttcattgctggactgattgccattgtgatggtgaccataatgctgtgttgtatgacctcctgttgttcctgtctgaaaggctgttgttcctgtggctcctgttgtaagtttgatgaggatgactctgaacctgtgctgaaaggagtgaaactgcactacacctgactcgagctggtactgcatgcacgcaatgctagctgcccctttcccgtcctgggtaccccgagtctcccccgacctcgggtcccaggtatgctcccacctccacctgccccactcaccacctctgctagttccagacacctcccaagcacgcagcaatgcagctcaaaacgcttagcctagccacacccccacgggaaacagcagtgattaacctttagcaataaacgaaagtttaactaagctatactaaccccagggttggtcaatttcgtgccagccacaccctggagctagcaaaccgctgatcagcctcgactgtgccttctagttgccagccatctgttgtttgcccctcccccgtgccttccttgaccctggaaggtgccactcccactgtcctttcctaataaaatgaggaaattgcatcgcattgtctgagtaggtgtcattctattctggggggtggggtggggcaggacagcaagggggaggattgggaagacaatagcaggcatgctggggatgcggtgggctctatggcttctgaggcggaaagaaccagctggggctctagggggtatccccacgcgccctgtagcggcgcattaagcgcggcgggtgtggtggttacgcgcagcgtgaccgctacacttgccagcgccctagcgcccgctcctttcgctttcttcccttcctttctcgccacgttcgccggctttccccgtcaagctctaaatcgggggctccctttagggttccgatttagtgctttacggcacctcgaccccaaaaaacttgattagggtgatggttcacgtagtgggccatcgccctgatagacggtttttcgccctttgacgttggagtccacgttctttaatagtggactcttgttccaaactggaacaacactcaaccctatctcggtctattcttttgatttataagggattttgccgatttcggcctattggttaaaaaatgagctgatttaacaaaaatttaacgcgaattaattctgtggaatgtgtgtcagttagggtgtggaaagtccccaggctccccagcaggcagaagtatgcaaagcatgcatctcaattagtcagcaaccaggtgtggaaagtccccaggctccccagcaggcagaagtatgcaaagcatgcatctcaattagtcagcaaccatagtcccgcccctaactccgcccatcccgcccctaactccgcccagttccgcccattctccgccccatggctgactaattttttttatttatgcagaggccgaggccgcctctgcctctgagctattccagaagtagtgaggaggcttttttggaggcctaggcttttgcaaaaagctcccgggagcttgtatatccattttcggatctgatcaagagacaggatgaggatcgtttcgcatgattgaacaagatggattgcacgcaggttctccggccgcttgggtggagaggctattcggctatgactgggcacaacagacaatcggctgctctgatgccgccgtgttccggctgtcagcgcaggggcgcccggttctttttgtcaagaccgacctgtccggtgccctgaatgaactgcaggacgaggcagcgcggctatcgtggctggccacgacgggcgttccttgcgcagctgtgctcgacgttgtcactgaagcgggaagggactggctgctattgggcgaagtgccggggcaggatctcctgtcatctcaccttgctcctgccgagaaagtatccatcatggctgatgcaatgcggcggctgcatacgcttgatccggctacctgcccattcgaccaccaagcgaaacatcgcatcgagcgagcacgtactcggatggaagccggtcttgtcgatcaggatgatctggacgaagagcatcaggggctcgcgccagccgaactgttcgccaggctcaaggcgcgcatgcccgacggcgaggatctcgtcgtgacccatggcgatgcctgcttgccgaatatcatggtggaaaatggccgcttttctggattcatcgactgtggccggctgggtgtggcggaccgctatcaggacatagcgttggctacccgtgatattgctgaagagcttggcggcgaatgggctgaccgcttcctcgtgctttacggtatcgccgctcccgattcgcagcgcatcgccttctatcgccttcttgacgagttcttctgagcgggactctggggttcgaaatgaccgaccaagcgacgcccaacctgccatcacgagatttcgattccaccgccgccttctatgaaaggttgggcttcggaatcgttttccgggacgccggctggatgatcctccagcgcggggatctcatgctggagttcttcgcccaccccaacttgtttattgcagcttataatggttacaaataaagcaatagcatcacaaatttcacaaataaagcatttttttcactgcattctagttgtggtttgtccaaactcatcaatgtatcttatcatgtctgtataccgtcgacctctagctagagcttggcgtaatcatggtcatagctgtttcctgtgtgaaattgttatccgctcacaattccacacaacatacgagccggaagcataaagtgtaaagcctggggtgcctaatgagtgagctaactcacattaattgcgttgcgctcactgcccgctttccagtcgggaaacctgtcgtgccagctgcattaatgaatcggccaacgcgcggggagaggcggtttgcgtattgggcgctcttccgcttcctcgctcactgactcgctgcgctcggtcgttcggctgcggcgagcggtatcagctcactcaaaggcggtaatacggttatccacagaatcaggggataacgcaggaaagaacatgtgagcaaaaggccagcaaaaggccaggaaccgtaaaaaggccgcgttgctggcgtttttccataggctccgcccccctgacgagcatcacaaaaatcgacgctcaagtcagaggtggcgaaacccgacaggactataaagataccaggcgtttccccctggaagctccctcgtgcgctctcctgttccgaccctgccgcttaccggatacctgtccgcctttctcccttcgggaagcgtggcgctttctcatagctcacgctgtaggtatctcagttcggtgtaggtcgttcgctccaagctgggctgtgtgcacgaaccccccgttcagcccgaccgctgcgccttatccggtaactatcgtcttgagtccaacccggtaagacacgacttatcgccactggcagcagccactggtaacaggattagcagagcgaggtatgtaggcggtgctacagagttcttgaagtggtggcctaactacggctacactagaagaacagtatttggtatctgcgctctgctgaagccagttaccttcggaaaaagagttggtagctcttgatccggcaaacaaaccaccgctggtagcggtggtttttttgtttgcaagcagcagattacgcgcagaaaaaaaggatctcaagaagatcctttgatcttttctacggggtctgacgctcagtggaacgaaaactcacgttaagggattttggtcatgagattatcaaaaaggatcttcacctagatccttttaaattaaaaatgaagttttaaatcaatctaaagtatatatgagtaaacttggtctgacagttaccaatgcttaatcagtgaggcacctatctcagcgatctgtctatttcgttcatccatagttgcctgactccccgtcgtgtagataactacgatacgggagggcttaccatctggccccagtgctgcaatgataccgcgagacccacgctcaccggctccagatttatcagcaataaaccagccagccggaagggccgagcgcagaagtggtcctgcaactttatccgcctccatccagtctattaattgttgccgggaagctagagtaagtagttcgccagttaatagtttgcgcaacgttgttgccattgctacaggcatcgtggtgtcacgctcgtcgtttggtatggcttcattcagctccggttcccaacgatcaaggcgagttacatgatcccccatgttgtgcaaaaaagcggttagctccttcggtcctccgatcgttgtcagaagtaagttggccgcagtgttatcactcatggttatggcagcactgcataattctcttactgtcatgccatccgtaagatgcttttctgtgactggtgagtactcaaccaagtcattctgagaatagtgtatgcggcgaccgagttgctcttgcccggcgtcaatacgggataataccgcgccacatagcagaactttaaaagtgctcatcattggaaaacgttcttcggggcgaaaactctcaaggatcttaccgctgttgagatccagttcgatgtaacccactcgtgcacccaactgatcttcagcatcttttactttcaccagcgtttctgggtgagcaaaaacaggaaggcaaaatgccgcaaaaaagggaataagggcgacacggaaatgttgaatactcatactcttcctttttcaatattattgaagcatttatcagggttattgtctcatgagcggatacatatttgaatgtatttagaaaaataaacaaataggggttccgcgcacatttccccgaaaagtgccacctgacgtc

SEQ ID NO: 87 - DNA, 7639 bp, synthetic construct
  misc_feature 1..7639: note pZV05_SARS-CoV-2-UTR-spike_delta_HexaPro_S1_G637_SPY_tag
  source 1..7639: mol_type = other DNA
gacggatcgggagatctcccgatcccctatggtgcactctcagtacaatctgctctgatgccgcatagttaagccagtatctgctccctgcttgtgtgttggaggtcgctgagtagtgcgcgagcaaaatttaagctacaacaaggcaaggcttgaccgacaattgcatgaagaatctgcttagggttaggcgttttgcgctgcttcgcgatgtacgggccagatatacgcgttgacattgattattgactagttattaatagtaatcaattacggggtcattagttcatagcccatatatggagttccgcgttacataacttacggtaaatggcccgcctggctgaccgcccaacgacccccgcccattgacgtcaataatgacgtatgttcccatagtaacgccaatagggactttccattgacgtcaatgggtggagtatttacggtaaactgcccacttggcagtacatcaagtgtatcatatgccaagtacgccccctattgacgtcaatgacggtaaatggcccgcctggcattatgcccagtacatgaccttatgggactttcctacttggcagtacatctacgtattagtcatcgctattaccatggtgatgcggttttggcagtacatcaatgggcgtggatagcggtttgactcacggggatttccaagtctccaccccattgacgtcaatgggagtttgttttggcaccaaaatcaacgggactttccaaaatgtcgtaacaactccgccccattgacgcaaatgggcggtaggcgtgtacggtgggaggtctatataagcagagctctctggctaactagagaacccactgcttactggcttatcgaaattaatacgactcactatagggagacccaagctggctagccaccgagaataaactagtattcttctggtccccacagactcagagagaacccgccaccatgtttgtgttcctggtgctgctgccactggtgtccagccagtgtgtgaacctgaggaccaggacccaacttcctcctgcctacaccaactccttcaccaggggagtctactaccctgacaaggtgttcaggtcctctgtgctgcacagcacccaggacctgttcctgccattcttcagcaatgtgacctggttccatgccatccatgtgtctggcaccaatggcaccaagaggtttgacaaccctgtgctgccattcaatgatggagtctactttgccagcacagagaagagcaacatcatcaggggctggatttttggcaccaccctggacagcaagacccagtccctgctgattgtgaacaatgccaccaatgtggtgattaaggtgtgtgagttccagttctgtaatgacccattcctggacgtctactaccacaagaacaacaagtcctggatggagtctggcgtctactcctctgccaacaactgtacctttgaatatgtgagccaaccattcctgatggacttggagggcaagcagggcaacttcaagaacctgagggagtttgtgttcaagaacattgatggctacttcaagatttacagcaaacacacaccaatcaacctggtgagggacctgccacagggcttctctgccttggaaccactggtggacctgccaattggcatcaacatcaccaggttccagaccctgctggctctgcacaggtcctacctgacacctggagactcctcctctggctggacagcaggagcagcagcctactatgtgggctacctccaaccaaggaccttcctgctgaaatacaatgagaatggcaccatcacagatgctgtggactgtgccctggacccactgtctgagaccaagtgtaccctgaaatccttcacagtggagaagggcatctaccagaccagcaacttcagggtccaaccaacagagagcattgtgaggtttccaaacatcaccaacctgtgtccatttggagaggtgttcaatgccaccaggtttgcctctgtctatgcctggaacaggaagaggattagcaactgtgtggctgactactctgtgctctacaactctgcctccttcagcaccttcaagtgttatggagtgagcccaaccaaactgaatgacctgtgtttcaccaatgtctatgctgactcctttgtgattaggggagatgaggtgagacagattgcccctggacaaacaggcaagattgctgactacaactacaaactgcctgatgacttcacaggctgtgtgattgcctggaacagcaacaacctggacagcaaggtgggaggcaactacaactacaggtacagactgttcaggaagagcaacctgaaaccatttgagagggacatcagcacagagatttaccaggctggcagcaagccatgtaatggagtggagggcttcaactgttactttccactccaatcctatggcttccaaccaaccaatggagtgggctaccaaccatacagggtggtggtgctgtcctttgaactgctccatgcccctgccacagtgtgtggaccaaagaagagcaccaacctggtgaagaacaagtgtgtgaacttcaacttcaatggactgacaggcacaggagtgctgacagagagcaacaagaagttcctgccattccaacagtttggcagggacattgctgacaccacagatgctgtgagggacccacagaccttggagattctggacatcacaccatgttcctttggaggagtgtctgtgattacacctggcaccaacaccagcaaccaggtggctgtgctctaccagggcgtgaactgtactgaggtgcctgtggctatccatgctgaccaacttacaccaacctggagggtctacagcacaggacgtggcgtgcctcatatcgtgatggtggacgcctacaagcgttacaagtgactcgagctggtactgcatgcacgcaatgctagctgcccctttcccgtcctgggtaccccgagtctcccccgacctcgggtcccaggtatgctcccacctccacctgccccactcaccacctctgctagttccagacacctcccaagcacgcagcaatgcagctcaaaacgcttagcctagccacacccccacgggaaacagcagtgattaacctttagcaataaacgaaagtttaactaagctatactaaccccagggttggtcaatttcgtgccagccacaccctggagctagcaaaccgctgatcagcctcgactgtgccttctagttgccagccatctgttgtttgcccctcccccgtgccttccttgaccctggaaggtgccactcccactgtcctttcctaataaaatgaggaaattgcatcgcattgtctgagtaggtgtcattctattctggggggtggggtggggcaggacagcaagggggaggattgggaagacaatagcaggcatgctggggatgcggtgggctctatggcttctgaggcggaaagaaccagctggggctctagggggtatccccacgcgccctgtagcggcgcattaagcgcggcgggtgtggtggttacgcgcagcgtgaccgctacacttgccagcgccctagcgcccgctcctttcgctttcttcccttcctttctcgccacgttcgccggctttccccgtcaagctctaaatcgggggctccctttagggttccgatttagtgctttacggcacctcgaccccaaaaaacttgattagggtgatggttcacgtagtgggccatcgccctgatagacggtttttcgccctttgacgttggagtccacgttctttaatagtggactcttgttccaaactggaacaacactcaaccctatctcggtctattcttttgatttataagggattttgccgatttcggcctattggttaaaaaatgagctgatttaacaaaaatttaacgcgaattaattctgtggaatgtgtgtcagttagggtgtggaaagtccccaggctccccagcaggcagaagtatgcaaagcatgcatctcaattagtcagcaaccaggtgtggaaagtccccaggctccccagcaggcagaagtatgcaaagcatgcatctcaattagtcagcaaccatagtcccgcccctaactccgcccatcccgcccctaactccgcccagttccgcccattctccgccccatggctgactaattttttttatttatgcagaggccgaggccgcctctgcctctgagctattccagaagtagtgaggaggcttttttggaggcctaggcttttgcaaaaagctcccgggagcttgtatatccattttcggatctgatcaagagacaggatgaggatcgtttcgcatgattgaacaagatggattgcacgcaggttctccggccgcttgggtggagaggctattcggctatgactgggcacaacagacaatcggctgctctgatgccgccgtgttccggctgtcagcgcaggggcgcccggttctttttgtcaagaccgacctgtccggtgccctgaatgaactgcaggacgaggcagcgcggctatcgtggctggccacgacgggcgttccttgcgcagctgtgctcgacgttgtcactgaagcgggaagggactggctgctattgggcgaagtgccggggcaggatctcctgtcatctcaccttgctcctgccgagaaagtatccatcatggctgatgcaatgcggcggctgcatacgcttgatccggctacctgcccattcgaccaccaagcgaaacatcgcatcgagcgagcacgtactcggatggaagccggtcttgtcgatcaggatgatctggacgaagagcatcaggggctcgcgccagccgaactgttcgccaggctcaaggcgcgcatgcccgacggcgaggatctcgtcgtgacccatggcgatgcctgcttgccgaatatcatggtggaaaatggccgcttttctggattcatcgactgtggccggctgggtgtggcggaccgctatcaggacatagcgttggctacccgtgatattgctgaagagcttggcggcgaatgggctgaccgcttcctcgtgctttacggtatcgccgctcccgattcgcagcgcatcgccttctatcgccttcttgacgagttcttctgagcgggactctggggttcgaaatgaccgaccaagcgacgcccaacctgccatcacgagatttcgattccaccgccgccttctatgaaaggttgggcttcggaatcgttttccgggacgccggctggatgatcctccagcgcggggatctcatgctggagttcttcgcccaccccaacttgtttattgcagcttataatggttacaaataaagcaatagcatcacaaatttcacaaataaagcatttttttcactgcattctagttgtggtttgtccaaactcatcaatgtatcttatcatgtctgtataccgtcgacctctagctagagcttggcgtaatcatggtcatagctgtttcctgtgtgaaattgttatccgctcacaattccacacaacatacgagccggaagcataaagtgtaaagcctggggtgcctaatgagtgagctaactcacattaattgcgttgcgctcactgcccgctttccagtcgggaaacctgtcgtgccagctgcattaatgaatcggccaacgcgcggggagaggcggtttgcgtattgggcgctcttccgcttcctcgctcactgactcgctgcgctcggtcgttcggctgcggcgagcggtatcagctcactcaaaggcggtaatacggttatccacagaatcaggggataacgcaggaaagaacatgtgagcaaaaggccagcaaaaggccaggaaccgtaaaaaggccgcgttgctggcgtttttccataggctccgcccccctgacgagcatcacaaaaatcgacgctcaagtcagaggtggcgaaacccgacaggactataaagataccaggcgtttccccctggaagctccctcgtgcgctctcctgttccgaccctgccgcttaccggatacctgtccgcctttctcccttcgggaagcgtggcgctttctcatagctcacgctgtaggtatctcagttcggtgtaggtcgttcgctccaagctgggctgtgtgcacgaaccccccgttcagcccgaccgctgcgccttatccggtaactatcgtcttgagtccaacccggtaagacacgacttatcgccactggcagcagccactggtaacaggattagcagagcgaggtatgtaggcggtgctacagagttcttgaagtggtggcctaactacggctacactagaagaacagtatttggtatctgcgctctgctgaagccagttaccttcggaaaaagagttggtagctcttgatccggcaaacaaaccaccgctggtagcggtggtttttttgtttgcaagcagcagattacgcgcagaaaaaaaggatctcaagaagatcctttgatcttttctacggggtctgacgctcagtggaacgaaaactcacgttaagggattttggtcatgagattatcaaaaaggatcttcacctagatccttttaaattaaaaatgaagttttaaatcaatctaaagtatatatgagtaaacttggtctgacagttaccaatgcttaatcagtgaggcacctatctcagcgatctgtctatttcgttcatccatagttgcctgactccccgtcgtgtagataactacgatacgggagggcttaccatctggccccagtgctgcaatgataccgcgagacccacgctcaccggctccagatttatcagcaataaaccagccagccggaagggccgagcgcagaagtggtcctgcaactttatccgcctccatccagtctattaattgttgccgggaagctagagtaagtagttcgccagttaatagtttgcgcaacgttgttgccattgctacaggcatcgtggtgtcacgctcgtcgtttggtatggcttcattcagctccggttcccaacgatcaaggcgagttacatgatcccccatgttgtgcaaaaaagcggttagctccttcggtcctccgatcgttgtcagaagtaagttggccgcagtgttatcactcatggttatggcagcactgcataattctcttactgtcatgccatccgtaagatgcttttctgtgactggtgagtactcaaccaagtcattctgagaatagtgtatgcggcgaccgagttgctcttgcccggcgtcaatacgggataataccgcgccacatagcagaactttaaaagtgctcatcattggaaaacgttcttcggggcgaaaactctcaaggatcttaccgctgttgagatccagttcgatgtaacccactcgtgcacccaactgatcttcagcatcttttactttcaccagcgtttctgggtgagcaaaaacaggaaggcaaaatgccgcaaaaaagggaataagggcgacacggaaatgttgaatactcatactcttcctttttcaatattattgaagcatttatcagggttattgtctcatgagcggatacatatttgaatgtatttagaaaaataaacaaataggggttccgcgcacatttccccgaaaagtgccacctgacgtc

SEQ ID NO: 88 - DNA, 7969 bp, synthetic construct
  misc_feature 1..7969: note pZV06_SARS-CoV-2-UTR-spike_delta_HexaPro_SPY_catcher_S638_S 2
  source 1..7969: mol_type = other DNA
gacggatcgggagatctcccgatcccctatggtgcactctcagtacaatctgctctgatgccgcatagttaagccagtatctgctccctgcttgtgtgttggaggtcgctgagtagtgcgcgagcaaaatttaagctacaacaaggcaaggcttgaccgacaattgcatgaagaatctgcttagggttaggcgttttgcgctgcttcgcgatgtacgggccagatatacgcgttgacattgattattgactagttattaatagtaatcaattacggggtcattagttcatagcccatatatggagttccgcgttacataacttacggtaaatggcccgcctggctgaccgcccaacgacccccgcccattgacgtcaataatgacgtatgttcccatagtaacgccaatagggactttccattgacgtcaatgggtggagtatttacggtaaactgcccacttggcagtacatcaagtgtatcatatgccaagtacgccccctattgacgtcaatgacggtaaatggcccgcctggcattatgcccagtacatgaccttatgggactttcctacttggcagtacatctacgtattagtcatcgctattaccatggtgatgcggttttggcagtacatcaatgggcgtggatagcggtttgactcacggggatttccaagtctccaccccattgacgtcaatgggagtttgttttggcaccaaaatcaacgggactttccaaaatgtcgtaacaactccgccccattgacgcaaatgggcggtaggcgtgtacggtgggaggtctatataagcagagctctctggctaactagagaacccactgcttactggcttatcgaaattaatacgactcactatagggagacccaagctggctagccaccgagaataaactagtattcttctggtccccacagactcagagagaacccgccaccatgtttgtgttcctggtgctgctgccactggtgtccagcgtgaccacactgtccggactgtctggagagcagggaccatccggcgacatgaccacagaggaggattctgccacacacatcaagttcagcaagagggacgaggacggaagagagctggcaggagcaaccatggagctgagggatagctccggcaagaccatcagcacatggatctccgacggccacgtgaaggatttctacctgtatcccggcaagtacacctttgtggagacagcagcaccagacggatatgaggtggcaacccctatcgagtttacagtgaacgaggacggacaggtgaccgtggatggagaggcaacagagggcgatgcacacaccggcagcagcagcaacgtgttccagaccagggctggctgtctgattggagcagagcatgtgaacaactcctatgagtgtgacatcccaattggagcaggcatctgtgcctcctaccagacccagaccaacagcaggggctctgcatcttctgtggcaagccagagcatcattgcctacacaatgagtctgggagcagagaactctgtggcttacagcaacaacagcattgccatcccaaccaacttcaccatctctgtgaccacagagattctgcctgtgagtatgaccaagacctctgtggactgtacaatgtatatctgtggagacagcacagagtgtagcaacctgctgctccaatatggctccttctgtacccaacttaacagggctctgacaggcattgctgtggaacaggacaagaacacccaggaggtgtttgcccaggtgaagcagatttacaagacacctccaatcaaggactttggaggcttcaacttcagccagattctgcctgacccaagcaagccaagcaagaggtcccctattgaggacctgctgttcaacaaggtgaccctggctgatgctggcttcatcaagcaatatggagactgtctgggagacattgccgccagggacctgatttgtgcccagaagttcaatggactgacagtgctgcctccactgctgacagatgagatgattgcccaatacacctctgccctgctggctggcaccatcacctctggctggacctttggagcaggaccagccctccaaatcccatttccaatgcagatggcttacaggttcaatggcattggagtgacccagaatgtgctctatgagaaccagaaactgattgccaaccagttcaactctgccattggcaagattcaggactccctgtccagcacaccatctgccctgggcaaactccaaaacgtggtgaaccagaatgcccaggctctgaacaccctggtgaagcaactttccagcaactttggagccatctcctctgtgctgaatgacatcctgagcagactggacccaccagaggctgaggtccagattgacagactgattacaggcagactccaatccctccaaacctatgtgacccaacaacttatcagggctgctgagattagggcatctgccaacctggctgccaccaagatgagtgagtgtgtgctgggacaaagcaagagggtggacttctgtggcaagggctaccacctgatgagttttccacagtctgcccctcatggagtggtgttcctgcatgtgacctatgtgcctgcccaggagaagaacttcaccacagcccctgccatctgccatgatggcaaggctcactttccaagggagggagtgtttgtgagcaatggcacccactggtttgtgacccagaggaacttctatgaaccacagattatcaccacagacaacacctttgtgtctggcaactgtgatgtggtgattggcattgtgaacaacacagtctatgacccactccaacctgaactggactccttcaaggaggaactggacaaatacttcaagaaccacaccagccctgatgtggacctgggagacatctctggcatcaatgcctctgtggtgaacatccagaaggagattgacagactgaatgaggtggctaagaacctgaatgagtccctgattgacctccaagaactgggcaaatatgaacaatacatcaagtggccatggtacatctggctgggcttcattgctggactgattgccattgtgatggtgaccataatgctgtgttgtatgacctcctgttgttcctgtctgaaaggctgttgttcctgtggctcctgttgtaagtttgatgaggatgactctgaacctgtgctgaaaggagtgaaactgcactacacctgactcgagctggtactgcatgcacgcaatgctagctgcccctttcccgtcctgggtaccccgagtctcccccgacctcgggtcccaggtatgctcccacctccacctgccccactcaccacctctgctagttccagacacctcccaagcacgcagcaatgcagctcaaaacgcttagcctagccacacccccacgggaaacagcagtgattaacctttagcaataaacgaaagtttaactaagctatactaaccccagggttggtcaatttcgtgccagccacaccctggagctagcaaaccgctgatcagcctcgactgtgccttctagttgccagccatctgttgtttgcccctcccccgtgccttccttgaccctggaaggtgccactcccactgtcctttcctaataaaatgaggaaattgcatcgcattgtctgagtaggtgtcattctattctggggggtggggtggggcaggacagcaagggggaggattgggaagacaatagcaggcatgctggggatgcggtgggctctatggcttctgaggcggaaagaaccagctggggctctagggggtatccccacgcgccctgtagcggcgcattaagcgcggcgggtgtggtggttacgcgcagcgtgaccgctacacttgccagcgccctagcgcccgctcctttcgctttcttcccttcctttctcgccacgttcgccggctttccccgtcaagctctaaatcgggggctccctttagggttccgatttagtgctttacggcacctcgaccccaaaaaacttgattagggtgatggttcacgtagtgggccatcgccctgatagacggtttttcgccctttgacgttggagtccacgttctttaatagtggactcttgttccaaactggaacaacactcaaccctatctcggtctattcttttgatttataagggattttgccgatttcggcctattggttaaaaaatgagctgatttaacaaaaatttaacgcgaattaattctgtggaatgtgtgtcagttagggtgtggaaagtccccaggctccccagcaggcagaagtatgcaaagcatgcatctcaattagtcagcaaccaggtgtggaaagtccccaggctccccagcaggcagaagtatgcaaagcatgcatctcaattagtcagcaaccatagtcccgcccctaactccgcccatcccgcccctaactccgcccagttccgcccattctccgccccatggctgactaattttttttatttatgcagaggccgaggccgcctctgcctctgagctattccagaagtagtgaggaggcttttttggaggcctaggcttttgcaaaaagctcccgggagcttgtatatccattttcggatctgatcaagagacaggatgaggatcgtttcgcatgattgaacaagatggattgcacgcaggttctccggccgcttgggtggagaggctattcggctatgactgggcacaacagacaatcggctgctctgatgccgccgtgttccggctgtcagcgcaggggcgcccggttctttttgtcaagaccgacctgtccggtgccctgaatgaactgcaggacgaggcagcgcggctatcgtggctggccacgacgggcgttccttgcgcagctgtgctcgacgttgtcactgaagcgggaagggactggctgctattgggcgaagtgccggggcaggatctcctgtcatctcaccttgctcctgccgagaaagtatccatcatggctgatgcaatgcggcggctgcatacgcttgatccggctacctgcccattcgaccaccaagcgaaacatcgcatcgagcgagcacgtactcggatggaagccggtcttgtcgatcaggatgatctggacgaagagcatcaggggctcgcgccagccgaactgttcgccaggctcaaggcgcgcatgcccgacggcgaggatctcgtcgtgacccatggcgatgcctgcttgccgaatatcatggtggaaaatggccgcttttctggattcatcgactgtggccggctgggtgtggcggaccgctatcaggacatagcgttggctacccgtgatattgctgaagagcttggcggcgaatgggctgaccgcttcctcgtgctttacggtatcgccgctcccgattcgcagcgcatcgccttctatcgccttcttgacgagttcttctgagcgggactctggggttcgaaatgaccgaccaagcgacgcccaacctgccatcacgagatttcgattccaccgccgccttctatgaaaggttgggcttcggaatcgttttccgggacgccggctggatgatcctccagcgcggggatctcatgctggagttcttcgcccaccccaacttgtttattgcagcttataatggttacaaataaagcaatagcatcacaaatttcacaaataaagcatttttttcactgcattctagttgtggtttgtccaaactcatcaatgtatcttatcatgtctgtataccgtcgacctctagctagagcttggcgtaatcatggtcatagctgtttcctgtgtgaaattgttatccgctcacaattccacacaacatacgagccggaagcataaagtgtaaagcctggggtgcctaatgagtgagctaactcacattaattgcgttgcgctcactgcccgctttccagtcgggaaacctgtcgtgccagctgcattaatgaatcggccaacgcgcggggagaggcggtttgcgtattgggcgctcttccgcttcctcgctcactgactcgctgcgctcggtcgttcggctgcggcgagcggtatcagctcactcaaaggcggtaatacggttatccacagaatcaggggataacgcaggaaagaacatgtgagcaaaaggccagcaaaaggccaggaaccgtaaaaaggccgcgttgctggcgtttttccataggctccgcccccctgacgagcatcacaaaaatcgacgctcaagtcagaggtggcgaaacccgacaggactataaagataccaggcgtttccccctggaagctccctcgtgcgctctcctgttccgaccctgccgcttaccggatacctgtccgcctttctcccttcgggaagcgtggcgctttctcatagctcacgctgtaggtatctcagttcggtgtaggtcgttcgctccaagctgggctgtgtgcacgaaccccccgttcagcccgaccgctgcgccttatccggtaactatcgtcttgagtccaacccggtaagacacgacttatcgccactggcagcagccactggtaacaggattagcagagcgaggtatgtaggcggtgctacagagttcttgaagtggtggcctaactacggctacactagaagaacagtatttggtatctgcgctctgctgaagccagttaccttcggaaaaagagttggtagctcttgatccggcaaacaaaccaccgctggtagcggtggtttttttgtttgcaagcagcagattacgcgcagaaaaaaaggatctcaagaagatcctttgatcttttctacggggtctgacgctcagtggaacgaaaactcacgttaagggattttggtcatgagattatcaaaaaggatcttcacctagatccttttaaattaaaaatgaagttttaaatcaatctaaagtatatatgagtaaacttggtctgacagttaccaatgcttaatcagtgaggcacctatctcagcgatctgtctatttcgttcatccatagttgcctgactccccgtcgtgtagataactacgatacgggagggcttaccatctggccccagtgctgcaatgataccgcgagacccacgctcaccggctccagatttatcagcaataaaccagccagccggaagggccgagcgcagaagtggtcctgcaactttatccgcctccatccagtctattaattgttgccgggaagctagagtaagtagttcgccagttaatagtttgcgcaacgttgttgccattgctacaggcatcgtggtgtcacgctcgtcgtttggtatggcttcattcagctccggttcccaacgatcaaggcgagttacatgatcccccatgttgtgcaaaaaagcggttagctccttcggtcctccgatcgttgtcagaagtaagttggccgcagtgttatcactcatggttatggcagcactgcataattctcttactgtcatgccatccgtaagatgcttttctgtgactggtgagtactcaaccaagtcattctgagaatagtgtatgcggcgaccgagttgctcttgcccggcgtcaatacgggataataccgcgccacatagcagaactttaaaagtgctcatcattggaaaacgttcttcggggcgaaaactctcaaggatcttaccgctgttgagatccagttcgatgtaacccactcgtgcacccaactgatcttcagcatcttttactttcaccagcgtttctgggtgagcaaaaacaggaaggcaaaatgccgcaaaaaagggaataagggcgacacggaaatgttgaatactcatactcttcctttttcaatattattgaagcatttatcagggttattgtctcatgagcggatacatatttgaatgtatttagaaaaataaacaaataggggttccgcgcacatttccccgaaaagtgccacctgacgtc

SEQ ID NO: 89 - DNA, 7729 bp, synthetic construct
  misc_feature 1..7729: note pZV07_SARS-CoV-2-UTR-spike_delta_HexaPro_S1_S683_furin
  source 1..7729: mol_type = other DNA
gacggatcgggagatctcccgatcccctatggtgcactctcagtacaatctgctctgatgccgcatagttaagccagtatctgctccctgcttgtgtgttggaggtcgctgagtagtgcgcgagcaaaatttaagctacaacaaggcaaggcttgaccgacaattgcatgaagaatctgcttagggttaggcgttttgcgctgcttcgcgatgtacgggccagatatacgcgttgacattgattattgactagttattaatagtaatcaattacggggtcattagttcatagcccatatatggagttccgcgttacataacttacggtaaatggcccgcctggctgaccgcccaacgacccccgcccattgacgtcaataatgacgtatgttcccatagtaacgccaatagggactttccattgacgtcaatgggtggagtatttacggtaaactgcccacttggcagtacatcaagtgtatcatatgccaagtacgccccctattgacgtcaatgacggtaaatggcccgcctggcattatgcccagtacatgaccttatgggactttcctacttggcagtacatctacgtattagtcatcgctattaccatggtgatgcggttttggcagtacatcaatgggcgtggatagcggtttgactcacggggatttccaagtctccaccccattgacgtcaatgggagtttgttttggcaccaaaatcaacgggactttccaaaatgtcgtaacaactccgccccattgacgcaaatgggcggtaggcgtgtacggtgggaggtctatataagcagagctctctggctaactagagaacccactgcttactggcttatcgaaattaatacgactcactatagggagacccaagctggctagccaccgagaataaactagtattcttctggtccccacagactcagagagaacccgccaccatgtttgtgttcctggtgctgctgccactggtgtccagccagtgtgtgaacctgaggaccaggacccaacttcctcctgcctacaccaactccttcaccaggggagtctactaccctgacaaggtgttcaggtcctctgtgctgcacagcacccaggacctgttcctgccattcttcagcaatgtgacctggttccatgccatccatgtgtctggcaccaatggcaccaagaggtttgacaaccctgtgctgccattcaatgatggagtctactttgccagcacagagaagagcaacatcatcaggggctggatttttggcaccaccctggacagcaagacccagtccctgctgattgtgaacaatgccaccaatgtggtgattaaggtgtgtgagttccagttctgtaatgacccattcctggacgtctactaccacaagaacaacaagtcctggatggagtctggcgtctactcctctgccaacaactgtacctttgaatatgtgagccaaccattcctgatggacttggagggcaagcagggcaacttcaagaacctgagggagtttgtgttcaagaacattgatggctacttcaagatttacagcaaacacacaccaatcaacctggtgagggacctgccacagggcttctctgccttggaaccactggtggacctgccaattggcatcaacatcaccaggttccagaccctgctggctctgcacaggtcctacctgacacctggagactcctcctctggctggacagcaggagcagcagcctactatgtgggctacctccaaccaaggaccttcctgctgaaatacaatgagaatggcaccatcacagatgctgtggactgtgccctggacccactgtctgagaccaagtgtaccctgaaatccttcacagtggagaagggcatctaccagaccagcaacttcagggtccaaccaacagagagcattgtgaggtttccaaacatcaccaacctgtgtccatttggagaggtgttcaatgccaccaggtttgcctctgtctatgcctggaacaggaagaggattagcaactgtgtggctgactactctgtgctctacaactctgcctccttcagcaccttcaagtgttatggagtgagcccaaccaaactgaatgacctgtgtttcaccaatgtctatgctgactcctttgtgattaggggagatgaggtgagacagattgcccctggacaaacaggcaagattgctgactacaactacaaactgcctgatgacttcacaggctgtgtgattgcctggaacagcaacaacctggacagcaaggtgggaggcaactacaactacaggtacagactgttcaggaagagcaacctgaaaccatttgagagggacatcagcacagagatttaccaggctggcagcaagccatgtaatggagtggagggcttcaactgttactttccactccaatcctatggcttccaaccaaccaatggagtgggctaccaaccatacagggtggtggtgctgtcctttgaactgctccatgcccctgccacagtgtgtggaccaaagaagagcaccaacctggtgaagaacaagtgtgtgaacttcaacttcaatggactgacaggcacaggagtgctgacagagagcaacaagaagttcctgccattccaacagtttggcagggacattgctgacaccacagatgctgtgagggacccacagaccttggagattctggacatcacaccatgttcctttggaggagtgtctgtgattacacctggcaccaacaccagcaaccaggtggctgtgctctaccagggcgtgaactgtactgaggtgcctgtggctatccatgctgaccaacttacaccaacctggagggtctacagcacaggaagcaacgtgttccagaccagggctggctgtctgattggagcagagcatgtgaacaactcctatgagtgtgacatcccaattggagcaggcatctgtgcctcctaccagacccagaccaacagcaggggctctgcatcttgactcgagctggtactgcatgcacgcaatgctagctgcccctttcccgtcctgggtaccccgagtctcccccgacctcgggtcccaggtatgctcccacctccacctgccccactcaccacctctgctagttccagacacctcccaagcacgcagcaatgcagctcaaaacgcttagcctagccacacccccacgggaaacagcagtgattaacctttagcaataaacgaaagtttaactaagctatactaaccccagggttggtcaatttcgtgccagccacaccctggagctagcaaaccgctgatcagcctcgactgtgccttctagttgccagccatctgttgtttgcccctcccccgtgccttccttgaccctggaaggtgccactcccactgtcctttcctaataaaatgaggaaattgcatcgcattgtctgagtaggtgtcattctattctggggggtggggtggggcaggacagcaagggggaggattgggaagacaatagcaggcatgctggggatgcggtgggctctatggcttctgaggcggaaagaaccagctggggctctagggggtatccccacgcgccctgtagcggcgcattaagcgcggcgggtgtggtggttacgcgcagcgtgaccgctacacttgccagcgccctagcgcccgctcctttcgctttcttcccttcctttctcgccacgttcgccggctttccccgtcaagctctaaatcgggggctccctttagggttccgatttagtgctttacggcacctcgaccccaaaaaacttgattagggtgatggttcacgtagtgggccatcgccctgatagacggtttttcgccctttgacgttggagtccacgttctttaatagtggactcttgttccaaactggaacaacactcaaccctatctcggtctattcttttgatttataagggattttgccgatttcggcctattggttaaaaaatgagctgatttaacaaaaatttaacgcgaattaattctgtggaatgtgtgtcagttagggtgtggaaagtccccaggctccccagcaggcagaagtatgcaaagcatgcatctcaattagtcagcaaccaggtgtggaaagtccccaggctccccagcaggcagaagtatgcaaagcatgcatctcaattagtcagcaaccatagtcccgcccctaactccgcccatcccgcccctaactccgcccagttccgcccattctccgccccatggctgactaattttttttatttatgcagaggccgaggccgcctctgcctctgagctattccagaagtagtgaggaggcttttttggaggcctaggcttttgcaaaaagctcccgggagcttgtatatccattttcggatctgatcaagagacaggatgaggatcgtttcgcatgattgaacaagatggattgcacgcaggttctccggccgcttgggtggagaggctattcggctatgactgggcacaacagacaatcggctgctctgatgccgccgtgttccggctgtcagcgcaggggcgcccggttctttttgtcaagaccgacctgtccggtgccctgaatgaactgcaggacgaggcagcgcggctatcgtggctggccacgacgggcgttccttgcgcagctgtgctcgacgttgtcactgaagcgggaagggactggctgctattgggcgaagtgccggggcaggatctcctgtcatctcaccttgctcctgccgagaaagtatccatcatggctgatgcaatgcggcggctgcatacgcttgatccggctacctgcccattcgaccaccaagcgaaacatcgcatcgagcgagcacgtactcggatggaagccggtcttgtcgatcaggatgatctggacgaagagcatcaggggctcgcgccagccgaactgttcgccaggctcaaggcgcgcatgcccgacggcgaggatctcgtcgtgacccatggcgatgcctgcttgccgaatatcatggtggaaaatggccgcttttctggattcatcgactgtggccggctgggtgtggcggaccgctatcaggacatagcgttggctacccgtgatattgctgaagagcttggcggcgaatgggctgaccgcttcctcgtgctttacggtatcgccgctcccgattcgcagcgcatcgccttctatcgccttcttgacgagttcttctgagcgggactctggggttcgaaatgaccgaccaagcgacgcccaacctgccatcacgagatttcgattccaccgccgccttctatgaaaggttgggcttcggaatcgttttccgggacgccggctggatgatcctccagcgcggggatctcatgctggagttcttcgcccaccccaacttgtttattgcagcttataatggttacaaataaagcaatagcatcacaaatttcacaaataaagcatttttttcactgcattctagttgtggtttgtccaaactcatcaatgtatcttatcatgtctgtataccgtcgacctctagctagagcttggcgtaatcatggtcatagctgtttcctgtgtgaaattgttatccgctcacaattccacacaacatacgagccggaagcataaagtgtaaagcctggggtgcctaatgagtgagctaactcacattaattgcgttgcgctcactgcccgctttccagtcgggaaacctgtcgtgccagctgcattaatgaatcggccaacgcgcggggagaggcggtttgcgtattgggcgctcttccgcttcctcgctcactgactcgctgcgctcggtcgttcggctgcggcgagcggtatcagctcactcaaaggcggtaatacggttatccacagaatcaggggataacgcaggaaagaacatgtgagcaaaaggccagcaaaaggccaggaaccgtaaaaaggccgcgttgctggcgtttttccataggctccgcccccctgacgagcatcacaaaaatcgacgctcaagtcagaggtggcgaaacccgacaggactataaagataccaggcgtttccccctggaagctccctcgtgcgctctcctgttccgaccctgccgcttaccggatacctgtccgcctttctcccttcgggaagcgtggcgctttctcatagctcacgctgtaggtatctcagttcggtgtaggtcgttcgctccaagctgggctgtgtgcacgaaccccccgttcagcccgaccgctgcgccttatccggtaactatcgtcttgagtccaacccggtaagacacgacttatcgccactggcagcagccactggtaacaggattagcagagcgaggtatgtaggcggtgctacagagttcttgaagtggtggcctaactacggctacactagaagaacagtatttggtatctgcgctctgctgaagccagttaccttcggaaaaagagttggtagctcttgatccggcaaacaaaccaccgctggtagcggtggtttttttgtttgcaagcagcagattacgcgcagaaaaaaaggatctcaagaagatcctttgatcttttctacggggtctgacgctcagtggaacgaaaactcacgttaagggattttggtcatgagattatcaaaaaggatcttcacctagatccttttaaattaaaaatgaagttttaaatcaatctaaagtatatatgagtaaacttggtctgacagttaccaatgcttaatcagtgaggcacctatctcagcgatctgtctatttcgttcatccatagttgcctgactccccgtcgtgtagataactacgatacgggagggcttaccatctggccccagtgctgcaatgataccgcgagacccacgctcaccggctccagatttatcagcaataaaccagccagccggaagggccgagcgcagaagtggtcctgcaactttatccgcctccatccagtctattaattgttgccgggaagctagagtaagtagttcgccagttaatagtttgcgcaacgttgttgccattgctacaggcatcgtggtgtcacgctcgtcgtttggtatggcttcattcagctccggttcccaacgatcaaggcgagttacatgatcccccatgttgtgcaaaaaagcggttagctccttcggtcctccgatcgttgtcagaagtaagttggccgcagtgttatcactcatggttatggcagcactgcataattctcttactgtcatgccatccgtaagatgcttttctgtgactggtgagtactcaaccaagtcattctgagaatagtgtatgcggcgaccgagttgctcttgcccggcgtcaatacgggataataccgcgccacatagcagaactttaaaagtgctcatcattggaaaacgttcttcggggcgaaaactctcaaggatcttaccgctgttgagatccagttcgatgtaacccactcgtgcacccaactgatcttcagcatcttttactttcaccagcgtttctgggtgagcaaaaacaggaaggcaaaatgccgcaaaaaagggaataagggcgacacggaaatgttgaatactcatactcttcctttttcaatattattgaagcatttatcagggttattgtctcatgagcggatacatatttgaatgtatttagaaaaataaacaaataggggttccgcgcacatttccccgaaaagtgccacctgacgtc

SEQ ID NO: 90 - DNA, 7483 bp, synthetic construct
  misc_feature 1..7483: note = pZV08_SARS-CoV-2-UTR-spike_delta_HexaPro_S684_S2
  source 1..7483: mol_type = other DNA
gacggatcgggagatctcccgatcccctatggtgcactctcagtacaatctgctctgatgccgcatagttaagccagtatctgctccctgcttgtgtgttggaggtcgctgagtagtgcgcgagcaaaatttaagctacaacaaggcaaggcttgaccgacaattgcatgaagaatctgcttagggttaggcgttttgcgctgcttcgcgatgtacgggccagatatacgcgttgacattgattattgactagttattaatagtaatcaattacggggtcattagttcatagcccatatatggagttccgcgttacataacttacggtaaatggcccgcctggctgaccgcccaacgacccccgcccattgacgtcaataatgacgtatgttcccatagtaacgccaatagggactttccattgacgtcaatgggtggagtatttacggtaaactgcccacttggcagtacatcaagtgtatcatatgccaagtacgccccctattgacgtcaatgacggtaaatggcccgcctggcattatgcccagtacatgaccttatgggactttcctacttggcagtacatctacgtattagtcatcgctattaccatggtgatgcggttttggcagtacatcaatgggcgtggatagcggtttgactcacggggatttccaagtctccaccccattgacgtcaatgggagtttgttttggcaccaaaatcaacgggactttccaaaatgtcgtaacaactccgccccattgacgcaaatgggcggtaggcgtgtacggtgggaggtctatataagcagagctctctggctaactagagaacccactgcttactggcttatcgaaattaatacgactcactatagggagacccaagctggctagccaccgagaataaactagtattcttctggtccccacagactcagagagaacccgccaccatgtttgtgttcctggtgctgctgccactggtgtccagctctgtggcaagccagagcatcattgcctacacaatgagtctgggagcagagaactctgtggcttacagcaacaacagcattgccatcccaaccaacttcaccatctctgtgaccacagagattctgcctgtgagtatgaccaagacctctgtggactgtacaatgtatatctgtggagacagcacagagtgtagcaacctgctgctccaatatggctccttctgtacccaacttaacagggctctgacaggcattgctgtggaacaggacaagaacacccaggaggtgtttgcccaggtgaagcagatttacaagacacctccaatcaaggactttggaggcttcaacttcagccagattctgcctgacccaagcaagccaagcaagaggtcccctattgaggacctgctgttcaacaaggtgaccctggctgatgctggcttcatcaagcaatatggagactgtctgggagacattgccgccagggacctgatttgtgcccagaagttcaatggactgacagtgctgcctccactgctgacagatgagatgattgcccaatacacctctgccctgctggctggcaccatcacctctggctggacctttggagcaggaccagccctccaaatcccatttccaatgcagatggcttacaggttcaatggcattggagtgacccagaatgtgctctatgagaaccagaaactgattgccaaccagttcaactctgccattggcaagattcaggactccctgtccagcacaccatctgccctgggcaaactccaaaacgtggtgaaccagaatgcccaggctctgaacaccctggtgaagcaactttccagcaactttggagccatctcctctgtgctgaatgacatcctgagcagactggacccaccagaggctgaggtccagattgacagactgattacaggcagactccaatccctccaaacctatgtgacccaacaacttatcagggctgctgagattagggcatctgccaacctggctgccaccaagatgagtgagtgtgtgctgggacaaagcaagagggtggacttctgtggcaagggctaccacctgatgagttttccacagtctgcccctcatggagtggtgttcctgcatgtgacctatgtgcctgcccaggagaagaacttcaccacagcccctgccatctgccatgatggcaaggctcactttccaagggagggagtgtttgtgagcaatggcacccactggtttgtgacccagaggaacttctatgaaccacagattatcaccacagacaacacctttgtgtctggcaactgtgatgtggtgattggcattgtgaacaacacagtctatgacccactccaacctgaactggactccttcaaggaggaactggacaaatacttcaagaaccacaccagccctgatgtggacctgggagacatctctggcatcaatgcctctgtggtgaacatccagaaggagattgacagactgaatgaggtggctaagaacctgaatgagtccctgattgacctccaagaactgggcaaatatgaacaatacatcaagtggccatggtacatctggctgggcttcattgctggactgattgccattgtgatggtgaccataatgctgtgttgtatgacctcctgttgttcctgtctgaaaggctgttgttcctgtggctcctgttgtaagtttgatgaggatgactctgaacctgtgctgaaaggagtgaaactgcactacacctgactcgagctggtactgcatgcacgcaatgctagctgcccctttcccgtcctgggtaccccgagtctcccccgacctcgggtcccaggtatgctcccacctccacctgccccactcaccacctctgctagttccagacacctcccaagcacgcagcaatgcagctcaaaacgcttagcctagccacacccccacgggaaacagcagtgattaacctttagcaataaacgaaagtttaactaagctatactaaccccagggttggtcaatttcgtgccagccacaccctggagctagcaaaccgctgatcagcctcgactgtgccttctagttgccagccatctgttgtttgcccctcccccgtgccttccttgaccctggaaggtgccactcccactgtcctttcctaataaaatgaggaaattgcatcgcattgtctgagtaggtgtcattctattctggggggtggggtggggcaggacagcaagggggaggattgggaagacaatagcaggcatgctggggatgcggtgggctctatggcttctgaggcggaaagaaccagctggggctctagggggtatccccacgcgccctgtagcggcgcattaagcgcggcgggtgtggtggttacgcgcagcgtgaccgctacacttgccagcgccctagcgcccgctcctttcgctttcttcccttcctttctcgccacgttcgccggctttccccgtcaagctctaaatcgggggctccctttagggttccgatttagtgctttacggcacctcgaccccaaaaaacttgattagggtgatggttcacgtagtgggccatcgccctgatagacggtttttcgccctttgacgttggagtccacgttctttaatagtggactcttgttccaaactggaacaacactcaaccctatctcggtctattcttttgatttataagggattttgccgatttcggcctattggttaaaaaatgagctgatttaacaaaaatttaacgcgaattaattctgtggaatgtgtgtcagttagggtgtggaaagtccccaggctccccagcaggcagaagtatgcaaagcatgcatctcaattagtcagcaaccaggtgtggaaagtccccaggctccccagcaggcagaagtatgcaaagcatgcatctcaattagtcagcaaccatagtcccgcccctaactccgcccatcccgcccctaactccgcccagttccgcccattctccgccccatggctgactaattttttttatttatgcagaggccgaggccgcctctgcctctgagctattccagaagtagtgaggaggcttttttggaggcctaggcttttgcaaaaagctcccgggagcttgtatatccattttcggatctgatcaagagacaggatgaggatcgtttcgcatgattgaacaagatggattgcacgcaggttctccggccgcttgggtggagaggctattcggctatgactgggcacaacagacaatcggctgctctgatgccgccgtgttccggctgtcagcgcaggggcgcccggttctttttgtcaagaccgacctgtccggtgccctgaatgaactgcaggacgaggcagcgcggctatcgtggctggccacgacgggcgttccttgcgcagctgtgctcgacgttgtcactgaagcgggaagggactggctgctattgggcgaagtgccggggcaggatctcctgtcatctcaccttgctcctgccgagaaagtatccatcatggctgatgcaatgcggcggctgcatacgcttgatccggctacctgcccattcgaccaccaagcgaaacatcgcatcgagcgagcacgtactcggatggaagccggtcttgtcgatcaggatgatctggacgaagagcatcaggggctcgcgccagccgaactgttcgccaggctcaaggcgcgcatgcccgacggcgaggatctcgtcgtgacccatggcgatgcctgcttgccgaatatcatggtggaaaatggccgcttttctggattcatcgactgtggccggctgggtgtggcggaccgctatcaggacatagcgttggctacccgtgatattgctgaagagcttggcggcgaatgggctgaccgcttcctcgtgctttacggtatcgccgctcccgattcgcagcgcatcgccttctatcgccttcttgacgagttcttctgagcgggactctggggttcgaaatgaccgaccaagcgacgcccaacctgccatcacgagatttcgattccaccgccgccttctatgaaaggttgggcttcggaatcgttttccgggacgccggctggatgatcctccagcgcggggatctcatgctggagttcttcgcccaccccaacttgtttattgcagcttataatggttacaaataaagcaatagcatcacaaatttcacaaataaagcatttttttcactgcattctagttgtggtttgtccaaactcatcaatgtatcttatcatgtctgtataccgtcgacctctagctagagcttggcgtaatcatggtcatagctgtttcctgtgtgaaattgttatccgctcacaattccacacaacatacgagccggaagcataaagtgtaaagcctggggtgcctaatgagtgagctaactcacattaattgcgttgcgctcactgcccgctttccagtcgggaaacctgtcgtgccagctgcattaatgaatcggccaacgcgcggggagaggcggtttgcgtattgggcgctcttccgcttcctcgctcactgactcgctgcgctcggtcgttcggctgcggcgagcggtatcagctcactcaaaggcggtaatacggttatccacagaatcaggggataacgcaggaaagaacatgtgagcaaaaggccagcaaaaggccaggaaccgtaaaaaggccgcgttgctggcgtttttccataggctccgcccccctgacgagcatcacaaaaatcgacgctcaagtcagaggtggcgaaacccgacaggactataaagataccaggcgtttccccctggaagctccctcgtgcgctctcctgttccgaccctgccgcttaccggatacctgtccgcctttctcccttcgggaagcgtggcgctttctcatagctcacgctgtaggtatctcagttcggtgtaggtcgttcgctccaagctgggctgtgtgcacgaaccccccgttcagcccgaccgctgcgccttatccggtaactatcgtcttgagtccaacccggtaagacacgacttatcgccactggcagcagccactggtaacaggattagcagagcgaggtatgtaggcggtgctacagagttcttgaagtggtggcctaactacggctacactagaagaacagtatttggtatctgcgctctgctgaagccagttaccttcggaaaaagagttggtagctcttgatccggcaaacaaaccaccgctggtagcggtggtttttttgtttgcaagcagcagattacgcgcagaaaaaaaggatctcaagaagatcctttgatcttttctacggggtctgacgctcagtggaacgaaaactcacgttaagggattttggtcatgagattatcaaaaaggatcttcacctagatccttttaaattaaaaatgaagttttaaatcaatctaaagtatatatgagtaaacttggtctgacagttaccaatgcttaatcagtgaggcacctatctcagcgatctgtctatttcgttcatccatagttgcctgactccccgtcgtgtagataactacgatacgggagggcttaccatctggccccagtgctgcaatgataccgcgagacccacgctcaccggctccagatttatcagcaataaaccagccagccggaagggccgagcgcagaagtggtcctgcaactttatccgcctccatccagtctattaattgttgccgggaagctagagtaagtagttcgccagttaatagtttgcgcaacgttgttgccattgctacaggcatcgtggtgtcacgctcgtcgtttggtatggcttcattcagctccggttcccaacgatcaaggcgagttacatgatcccccatgttgtgcaaaaaagcggttagctccttcggtcctccgatcgttgtcagaagtaagttggccgcagtgttatcactcatggttatggcagcactgcataattctcttactgtcatgccatccgtaagatgcttttctgtgactggtgagtactcaaccaagtcattctgagaatagtgtatgcggcgaccgagttgctcttgcccggcgtcaatacgggataataccgcgccacatagcagaactttaaaagtgctcatcattggaaaacgttcttcggggcgaaaactctcaaggatcttaccgctgttgagatccagttcgatgtaacccactcgtgcacccaactgatcttcagcatcttttactttcaccagcgtttctgggtgagcaaaaacaggaaggcaaaatgccgcaaaaaagggaataagggcgacacggaaatgttgaatactcatactcttcctttttcaatattattgaagcatttatcagggttattgtctcatgagcggatacatatttgaatgtatttagaaaaataaacaaataggggttccgcgcacatttccccgaaaagtgccacctgacgtc

SEQ ID NO: 91 - DNA, 7426 bp, synthetic construct
  misc_feature 1..7426: note pZV09_SARS-CoV-2-UTR-spike_delta_HexaPro_S684_S2_del_C19
  source 1..7426: mol_type = other DNA
gacggatcgggagatctcccgatcccctatggtgcactctcagtacaatctgctctgatgccgcatagttaagccagtatctgctccctgcttgtgtgttggaggtcgctgagtagtgcgcgagcaaaatttaagctacaacaaggcaaggcttgaccgacaattgcatgaagaatctgcttagggttaggcgttttgcgctgcttcgcgatgtacgggccagatatacgcgttgacattgattattgactagttattaatagtaatcaattacggggtcattagttcatagcccatatatggagttccgcgttacataacttacggtaaatggcccgcctggctgaccgcccaacgacccccgcccattgacgtcaataatgacgtatgttcccatagtaacgccaatagggactttccattgacgtcaatgggtggagtatttacggtaaactgcccacttggcagtacatcaagtgtatcatatgccaagtacgccccctattgacgtcaatgacggtaaatggcccgcctggcattatgcccagtacatgaccttatgggactttcctacttggcagtacatctacgtattagtcatcgctattaccatggtgatgcggttttggcagtacatcaatgggcgtggatagcggtttgactcacggggatttccaagtctccaccccattgacgtcaatgggagtttgttttggcaccaaaatcaacgggactttccaaaatgtcgtaacaactccgccccattgacgcaaatgggcggtaggcgtgtacggtgggaggtctatataagcagagctctctggctaactagagaacccactgcttactggcttatcgaaattaatacgactcactatagggagacccaagctggctagccaccgagaataaactagtattcttctggtccccacagactcagagagaacccgccaccatgtttgtgttcctggtgctgctgccactggtgtccagctctgtggcaagccagagcatcattgcctacacaatgagtctgggagcagagaactctgtggcttacagcaacaacagcattgccatcccaaccaacttcaccatctctgtgaccacagagattctgcctgtgagtatgaccaagacctctgtggactgtacaatgtatatctgtggagacagcacagagtgtagcaacctgctgctccaatatggctccttctgtacccaacttaacagggctctgacaggcattgctgtggaacaggacaagaacacccaggaggtgtttgcccaggtgaagcagatttacaagacacctccaatcaaggactttggaggcttcaacttcagccagattctgcctgacccaagcaagccaagcaagaggtcccctattgaggacctgctgttcaacaaggtgaccctggctgatgctggcttcatcaagcaatatggagactgtctgggagacattgccgccagggacctgatttgtgcccagaagttcaatggactgacagtgctgcctccactgctgacagatgagatgattgcccaatacacctctgccctgctggctggcaccatcacctctggctggacctttggagcaggaccagccctccaaatcccatttccaatgcagatggcttacaggttcaatggcattggagtgacccagaatgtgctctatgagaaccagaaactgattgccaaccagttcaactctgccattggcaagattcaggactccctgtccagcacaccatctgccctgggcaaactccaaaacgtggtgaaccagaatgcccaggctctgaacaccctggtgaagcaactttccagcaactttggagccatctcctctgtgctgaatgacatcctgagcagactggacccaccagaggctgaggtccagattgacagactgattacaggcagactccaatccctccaaacctatgtgacccaacaacttatcagggctgctgagattagggcatctgccaacctggctgccaccaagatgagtgagtgtgtgctgggacaaagcaagagggtggacttctgtggcaagggctaccacctgatgagttttccacagtctgcccctcatggagtggtgttcctgcatgtgacctatgtgcctgcccaggagaagaacttcaccacagcccctgccatctgccatgatggcaaggctcactttccaagggagggagtgtttgtgagcaatggcacccactggtttgtgacccagaggaacttctatgaaccacagattatcaccacagacaacacctttgtgtctggcaactgtgatgtggtgattggcattgtgaacaacacagtctatgacccactccaacctgaactggactccttcaaggaggaactggacaaatacttcaagaaccacaccagccctgatgtggacctgggagacatctctggcatcaatgcctctgtggtgaacatccagaaggagattgacagactgaatgaggtggctaagaacctgaatgagtccctgattgacctccaagaactgggcaaatatgaacaatacatcaagtggccatggtacatctggctgggcttcattgctggactgattgccattgtgatggtgaccataatgctgtgttgtatgacctcctgttgttcctgtctgaaaggctgttgttcctgtggctcctgttgttgactcgagctggtactgcatgcacgcaatgctagctgcccctttcccgtcctgggtaccccgagtctcccccgacctcgggtcccaggtatgctcccacctccacctgccccactcaccacctctgctagttccagacacctcccaagcacgcagcaatgcagctcaaaacgcttagcctagccacacccccacgggaaacagcagtgattaacctttagcaataaacgaaagtttaactaagctatactaaccccagggttggtcaatttcgtgccagccacaccctggagctagcaaaccgctgatcagcctcgactgtgccttctagttgccagccatctgttgtttgcccctcccccgtgccttccttgaccctggaaggtgccactcccactgtcctttcctaataaaatgaggaaattgcatcgcattgtctgagtaggtgtcattctattctggggggtggggtggggcaggacagcaagggggaggattgggaagacaatagcaggcatgctggggatgcggtgggctctatggcttctgaggcggaaagaaccagctggggctctagggggtatccccacgcgccctgtagcggcgcattaagcgcggcgggtgtggtggttacgcgcagcgtgaccgctacacttgccagcgccctagcgcccgctcctttcgctttcttcccttcctttctcgccacgttcgccggctttccccgtcaagctctaaatcgggggctccctttagggttccgatttagtgctttacggcacctcgaccccaaaaaacttgattagggtgatggttcacgtagtgggccatcgccctgatagacggtttttcgccctttgacgttggagtccacgttctttaatagtggactcttgttccaaactggaacaacactcaaccctatctcggtctattcttttgatttataagggattttgccgatttcggcctattggttaaaaaatgagctgatttaacaaaaatttaacgcgaattaattctgtggaatgtgtgtcagttagggtgtggaaagtccccaggctccccagcaggcagaagtatgcaaagcatgcatctcaattagtcagcaaccaggtgtggaaagtccccaggctccccagcaggcagaagtatgcaaagcatgcatctcaattagtcagcaaccatagtcccgcccctaactccgcccatcccgcccctaactccgcccagttccgcccattctccgccccatggctgactaattttttttatttatgcagaggccgaggccgcctctgcctctgagctattccagaagtagtgaggaggcttttttggaggcctaggcttttgcaaaaagctcccgggagcttgtatatccattttcggatctgatcaagagacaggatgaggatcgtttcgcatgattgaacaagatggattgcacgcaggttctccggccgcttgggtggagaggctattcggctatgactgggcacaacagacaatcggctgctctgatgccgccgtgttccggctgtcagcgcaggggcgcccggttctttttgtcaagaccgacctgtccggtgccctgaatgaactgcaggacgaggcagcgcggctatcgtggctggccacgacgggcgttccttgcgcagctgtgctcgacgttgtcactgaagcgggaagggactggctgctattgggcgaagtgccggggcaggatctcctgtcatctcaccttgctcctgccgagaaagtatccatcatggctgatgcaatgcggcggctgcatacgcttgatccggctacctgcccattcgaccaccaagcgaaacatcgcatcgagcgagcacgtactcggatggaagccggtcttgtcgatcaggatgatctggacgaagagcatcaggggctcgcgccagccgaactgttcgccaggctcaaggcgcgcatgcccgacggcgaggatctcgtcgtgacccatggcgatgcctgcttgccgaatatcatggtggaaaatggccgcttttctggattcatcgactgtggccggctgggtgtggcggaccgctatcaggacatagcgttggctacccgtgatattgctgaagagcttggcggcgaatgggctgaccgcttcctcgtgctttacggtatcgccgctcccgattcgcagcgcatcgccttctatcgccttcttgacgagttcttctgagcgggactctggggttcgaaatgaccgaccaagcgacgcccaacctgccatcacgagatttcgattccaccgccgccttctatgaaaggttgggcttcggaatcgttttccgggacgccggctggatgatcctccagcgcggggatctcatgctggagttcttcgcccaccccaacttgtttattgcagcttataatggttacaaataaagcaatagcatcacaaatttcacaaataaagcatttttttcactgcattctagttgtggtttgtccaaactcatcaatgtatcttatcatgtctgtataccgtcgacctctagctagagcttggcgtaatcatggtcatagctgtttcctgtgtgaaattgttatccgctcacaattccacacaacatacgagccggaagcataaagtgtaaagcctggggtgcctaatgagtgagctaactcacattaattgcgttgcgctcactgcccgctttccagtcgggaaacctgtcgtgccagctgcattaatgaatcggccaacgcgcggggagaggcggtttgcgtattgggcgctcttccgcttcctcgctcactgactcgctgcgctcggtcgttcggctgcggcgagcggtatcagctcactcaaaggcggtaatacggttatccacagaatcaggggataacgcaggaaagaacatgtgagcaaaaggccagcaaaaggccaggaaccgtaaaaaggccgcgttgctggcgtttttccataggctccgcccccctgacgagcatcacaaaaatcgacgctcaagtcagaggtggcgaaacccgacaggactataaagataccaggcgtttccccctggaagctccctcgtgcgctctcctgttccgaccctgccgcttaccggatacctgtccgcctttctcccttcgggaagcgtggcgctttctcatagctcacgctgtaggtatctcagttcggtgtaggtcgttcgctccaagctgggctgtgtgcacgaaccccccgttcagcccgaccgctgcgccttatccggtaactatcgtcttgagtccaacccggtaagacacgacttatcgccactggcagcagccactggtaacaggattagcagagcgaggtatgtaggcggtgctacagagttcttgaagtggtggcctaactacggctacactagaagaacagtatttggtatctgcgctctgctgaagccagttaccttcggaaaaagagttggtagctcttgatccggcaaacaaaccaccgctggtagcggtggtttttttgtttgcaagcagcagattacgcgcagaaaaaaaggatctcaagaagatcctttgatcttttctacggggtctgacgctcagtggaacgaaaactcacgttaagggattttggtcatgagattatcaaaaaggatcttcacctagatccttttaaattaaaaatgaagttttaaatcaatctaaagtatatatgagtaaacttggtctgacagttaccaatgcttaatcagtgaggcacctatctcagcgatctgtctatttcgttcatccatagttgcctgactccccgtcgtgtagataactacgatacgggagggcttaccatctggccccagtgctgcaatgataccgcgagacccacgctcaccggctccagatttatcagcaataaaccagccagccggaagggccgagcgcagaagtggtcctgcaactttatccgcctccatccagtctattaattgttgccgggaagctagagtaagtagttcgccagttaatagtttgcgcaacgttgttgccattgctacaggcatcgtggtgtcacgctcgtcgtttggtatggcttcattcagctccggttcccaacgatcaaggcgagttacatgatcccccatgttgtgcaaaaaagcggttagctccttcggtcctccgatcgttgtcagaagtaagttggccgcagtgttatcactcatggttatggcagcactgcataattctcttactgtcatgccatccgtaagatgcttttctgtgactggtgagtactcaaccaagtcattctgagaatagtgtatgcggcgaccgagttgctcttgcccggcgtcaatacgggataataccgcgccacatagcagaactttaaaagtgctcatcattggaaaacgttcttcggggcgaaaactctcaaggatcttaccgctgttgagatccagttcgatgtaacccactcgtgcacccaactgatcttcagcatcttttactttcaccagcgtttctgggtgagcaaaaacaggaaggcaaaatgccgcaaaaaagggaataagggcgacacggaaatgttgaatactcatactcttcctttttcaatattattgaagcatttatcagggttattgtctcatgagcggatacatatttgaatgtatttagaaaaataaacaaataggggttccgcgcacatttccccgaaaagtgccacctgacgtc

SEQ ID NO: 92 - DNA, 6967 bp, synthetic construct
  misc_feature 1..6967: note pZV10_SARS-CoV-2-UTR-spike_delta_HexaPro_NTD_T313_SPY_catch er
  source 1..6967: mol_type = other DNA
gacggatcgggagatctcccgatcccctatggtgcactctcagtacaatctgctctgatgccgcatagttaagccagtatctgctccctgcttgtgtgttggaggtcgctgagtagtgcgcgagcaaaatttaagctacaacaaggcaaggcttgaccgacaattgcatgaagaatctgcttagggttaggcgttttgcgctgcttcgcgatgtacgggccagatatacgcgttgacattgattattgactagttattaatagtaatcaattacggggtcattagttcatagcccatatatggagttccgcgttacataacttacggtaaatggcccgcctggctgaccgcccaacgacccccgcccattgacgtcaataatgacgtatgttcccatagtaacgccaatagggactttccattgacgtcaatgggtggagtatttacggtaaactgcccacttggcagtacatcaagtgtatcatatgccaagtacgccccctattgacgtcaatgacggtaaatggcccgcctggcattatgcccagtacatgaccttatgggactttcctacttggcagtacatctacgtattagtcatcgctattaccatggtgatgcggttttggcagtacatcaatgggcgtggatagcggtttgactcacggggatttccaagtctccaccccattgacgtcaatgggagtttgttttggcaccaaaatcaacgggactttccaaaatgtcgtaacaactccgccccattgacgcaaatgggcggtaggcgtgtacggtgggaggtctatataagcagagctctctggctaactagagaacccactgcttactggcttatcgaaattaatacgactcactatagggagacccaagctggctagccaccgagaataaactagtattcttctggtccccacagactcagagagaacccgccaccatgtttgtgttcctggtgctgctgccactggtgtccagccagtgtgtgaacctgaggaccaggacccaacttcctcctgcctacaccaactccttcaccaggggagtctactaccctgacaaggtgttcaggtcctctgtgctgcacagcacccaggacctgttcctgccattcttcagcaatgtgacctggttccatgccatccatgtgtctggcaccaatggcaccaagaggtttgacaaccctgtgctgccattcaatgatggagtctactttgccagcacagagaagagcaacatcatcaggggctggatttttggcaccaccctggacagcaagacccagtccctgctgattgtgaacaatgccaccaatgtggtgattaaggtgtgtgagttccagttctgtaatgacccattcctggacgtctactaccacaagaacaacaagtcctggatggagtctggcgtctactcctctgccaacaactgtacctttgaatatgtgagccaaccattcctgatggacttggagggcaagcagggcaacttcaagaacctgagggagtttgtgttcaagaacattgatggctacttcaagatttacagcaaacacacaccaatcaacctggtgagggacctgccacagggcttctctgccttggaaccactggtggacctgccaattggcatcaacatcaccaggttccagaccctgctggctctgcacaggtcctacctgacacctggagactcctcctctggctggacagcaggagcagcagcctactatgtgggctacctccaaccaaggaccttcctgctgaaatacaatgagaatggcaccatcacagatgctgtggactgtgccctggacccactgtctgagaccaagtgtaccctgaagtccttcacagtggagaagggcatctaccagaccggcagcagcgtgaccacactgtccggactgtctggagagcagggaccatccggcgacatgaccacagaggaggattctgccacacacatcaagttcagcaagagggacgaggacggaagagagctggcaggagcaaccatggagctgagggatagctccggcaagaccatcagcacatggatctccgacggccacgtgaaggatttctacctgtatcccggcaagtacacctttgtggagacagccgcaccagacggatatgaggtggcaacccctatcgagtttacagtgaacgaggacggacaggtgaccgtggatggagaggcaacagagggcgatgcacacacctgactcgagctggtactgcatgcacgcaatgctagctgcccctttcccgtcctgggtaccccgagtctcccccgacctcgggtcccaggtatgctcccacctccacctgccccactcaccacctctgctagttccagacacctcccaagcacgcagcaatgcagctcaaaacgcttagcctagccacacccccacgggaaacagcagtgattaacctttagcaataaacgaaagtttaactaagctatactaaccccagggttggtcaatttcgtgccagccacaccctggagctagcaaaccgctgatcagcctcgactgtgccttctagttgccagccatctgttgtttgcccctcccccgtgccttccttgaccctggaaggtgccactcccactgtcctttcctaataaaatgaggaaattgcatcgcattgtctgagtaggtgtcattctattctggggggtggggtggggcaggacagcaagggggaggattgggaagacaatagcaggcatgctggggatgcggtgggctctatggcttctgaggcggaaagaaccagctggggctctagggggtatccccacgcgccctgtagcggcgcattaagcgcggcgggtgtggtggttacgcgcagcgtgaccgctacacttgccagcgccctagcgcccgctcctttcgctttcttcccttcctttctcgccacgttcgccggctttccccgtcaagctctaaatcgggggctccctttagggttccgatttagtgctttacggcacctcgaccccaaaaaacttgattagggtgatggttcacgtagtgggccatcgccctgatagacggtttttcgccctttgacgttggagtccacgttctttaatagtggactcttgttccaaactggaacaacactcaaccctatctcggtctattcttttgatttataagggattttgccgatttcggcctattggttaaaaaatgagctgatttaacaaaaatttaacgcgaattaattctgtggaatgtgtgtcagttagggtgtggaaagtccccaggctccccagcaggcagaagtatgcaaagcatgcatctcaattagtcagcaaccaggtgtggaaagtccccaggctccccagcaggcagaagtatgcaaagcatgcatctcaattagtcagcaaccatagtcccgcccctaactccgcccatcccgcccctaactccgcccagttccgcccattctccgccccatggctgactaattttttttatttatgcagaggccgaggccgcctctgcctctgagctattccagaagtagtgaggaggcttttttggaggcctaggcttttgcaaaaagctcccgggagcttgtatatccattttcggatctgatcaagagacaggatgaggatcgtttcgcatgattgaacaagatggattgcacgcaggttctccggccgcttgggtggagaggctattcggctatgactgggcacaacagacaatcggctgctctgatgccgccgtgttccggctgtcagcgcaggggcgcccggttctttttgtcaagaccgacctgtccggtgccctgaatgaactgcaggacgaggcagcgcggctatcgtggctggccacgacgggcgttccttgcgcagctgtgctcgacgttgtcactgaagcgggaagggactggctgctattgggcgaagtgccggggcaggatctcctgtcatctcaccttgctcctgccgagaaagtatccatcatggctgatgcaatgcggcggctgcatacgcttgatccggctacctgcccattcgaccaccaagcgaaacatcgcatcgagcgagcacgtactcggatggaagccggtcttgtcgatcaggatgatctggacgaagagcatcaggggctcgcgccagccgaactgttcgccaggctcaaggcgcgcatgcccgacggcgaggatctcgtcgtgacccatggcgatgcctgcttgccgaatatcatggtggaaaatggccgcttttctggattcatcgactgtggccggctgggtgtggcggaccgctatcaggacatagcgttggctacccgtgatattgctgaagagcttggcggcgaatgggctgaccgcttcctcgtgctttacggtatcgccgctcccgattcgcagcgcatcgccttctatcgccttcttgacgagttcttctgagcgggactctggggttcgaaatgaccgaccaagcgacgcccaacctgccatcacgagatttcgattccaccgccgccttctatgaaaggttgggcttcggaatcgttttccgggacgccggctggatgatcctccagcgcggggatctcatgctggagttcttcgcccaccccaacttgtttattgcagcttataatggttacaaataaagcaatagcatcacaaatttcacaaataaagcatttttttcactgcattctagttgtggtttgtccaaactcatcaatgtatcttatcatgtctgtataccgtcgacctctagctagagcttggcgtaatcatggtcatagctgtttcctgtgtgaaattgttatccgctcacaattccacacaacatacgagccggaagcataaagtgtaaagcctggggtgcctaatgagtgagctaactcacattaattgcgttgcgctcactgcccgctttccagtcgggaaacctgtcgtgccagctgcattaatgaatcggccaacgcgcggggagaggcggtttgcgtattgggcgctcttccgcttcctcgctcactgactcgctgcgctcggtcgttcggctgcggcgagcggtatcagctcactcaaaggcggtaatacggttatccacagaatcaggggataacgcaggaaagaacatgtgagcaaaaggccagcaaaaggccaggaaccgtaaaaaggccgcgttgctggcgtttttccataggctccgcccccctgacgagcatcacaaaaatcgacgctcaagtcagaggtggcgaaacccgacaggactataaagataccaggcgtttccccctggaagctccctcgtgcgctctcctgttccgaccctgccgcttaccggatacctgtccgcctttctcccttcgggaagcgtggcgctttctcatagctcacgctgtaggtatctcagttcggtgtaggtcgttcgctccaagctgggctgtgtgcacgaaccccccgttcagcccgaccgctgcgccttatccggtaactatcgtcttgagtccaacccggtaagacacgacttatcgccactggcagcagccactggtaacaggattagcagagcgaggtatgtaggcggtgctacagagttcttgaagtggtggcctaactacggctacactagaagaacagtatttggtatctgcgctctgctgaagccagttaccttcggaaaaagagttggtagctcttgatccggcaaacaaaccaccgctggtagcggtggtttttttgtttgcaagcagcagattacgcgcagaaaaaaaggatctcaagaagatcctttgatcttttctacggggtctgacgctcagtggaacgaaaactcacgttaagggattttggtcatgagattatcaaaaaggatcttcacctagatccttttaaattaaaaatgaagttttaaatcaatctaaagtatatatgagtaaacttggtctgacagttaccaatgcttaatcagtgaggcacctatctcagcgatctgtctatttcgttcatccatagttgcctgactccccgtcgtgtagataactacgatacgggagggcttaccatctggccccagtgctgcaatgataccgcgagacccacgctcaccggctccagatttatcagcaataaaccagccagccggaagggccgagcgcagaagtggtcctgcaactttatccgcctccatccagtctattaattgttgccgggaagctagagtaagtagttcgccagttaatagtttgcgcaacgttgttgccattgctacaggcatcgtggtgtcacgctcgtcgtttggtatggcttcattcagctccggttcccaacgatcaaggcgagttacatgatcccccatgttgtgcaaaaaagcggttagctccttcggtcctccgatcgttgtcagaagtaagttggccgcagtgttatcactcatggttatggcagcactgcataattctcttactgtcatgccatccgtaagatgcttttctgtgactggtgagtactcaaccaagtcattctgagaatagtgtatgcggcgaccgagttgctcttgcccggcgtcaatacgggataataccgcgccacatagcagaactttaaaagtgctcatcattggaaaacgttcttcggggcgaaaactctcaaggatcttaccgctgttgagatccagttcgatgtaacccactcgtgcacccaactgatcttcagcatcttttactttcaccagcgtttctgggtgagcaaaaacaggaaggcaaaatgccgcaaaaaagggaataagggcgacacggaaatgttgaatactcatactcttcctttttcaatattattgaagcatttatcagggttattgtctcatgagcggatacatatttgaatgtatttagaaaaataaacaaataggggttccgcgcacatttccccgaaaagtgccacctgacgtc

SEQ ID NO: 93 - DNA, 6877 bp, synthetic construct
  misc_feature 1..6877: note pZV11_SARS-CoV-2-UTR-spike_delta_HexaPro_SPY_tag_S314_RBD_S 683
  source 1..6877: mol_type = other DNA
gacggatcgggagatctcccgatcccctatggtgcactctcagtacaatctgctctgatgccgcatagttaagccagtatctgctccctgcttgtgtgttggaggtcgctgagtagtgcgcgagcaaaatttaagctacaacaaggcaaggcttgaccgacaattgcatgaagaatctgcttagggttaggcgttttgcgctgcttcgcgatgtacgggccagatatacgcgttgacattgattattgactagttattaatagtaatcaattacggggtcattagttcatagcccatatatggagttccgcgttacataacttacggtaaatggcccgcctggctgaccgcccaacgacccccgcccattgacgtcaataatgacgtatgttcccatagtaacgccaatagggactttccattgacgtcaatgggtggagtatttacggtaaactgcccacttggcagtacatcaagtgtatcatatgccaagtacgccccctattgacgtcaatgacggtaaatggcccgcctggcattatgcccagtacatgaccttatgggactttcctacttggcagtacatctacgtattagtcatcgctattaccatggtgatgcggttttggcagtacatcaatgggcgtggatagcggtttgactcacggggatttccaagtctccaccccattgacgtcaatgggagtttgttttggcaccaaaatcaacgggactttccaaaatgtcgtaacaactccgccccattgacgcaaatgggcggtaggcgtgtacggtgggaggtctatataagcagagctctctggctaactagagaacccactgcttactggcttatcgaaattaatacgactcactatagggagacccaagctggctagccaccgagaataaactagtattcttctggtccccacagactcagagagaacccgccaccatgtttgtgttcctggtgctgctgccactggtgtccagccgtggcgtgcctcatatcgtgatggtggacgcctacaagcgttacaagagcaacttcagggtccaaccaacagagagcattgtgaggtttccaaacatcaccaacctgtgtccatttggagaggtgttcaatgccaccaggtttgcctctgtctatgcctggaacaggaagaggattagcaactgtgtggctgactactctgtgctctacaactctgcctccttcagcaccttcaagtgttatggagtgagcccaaccaaactgaatgacctgtgtttcaccaatgtctatgctgactcctttgtgattaggggagatgaggtgagacagattgcccctggacaaacaggcaagattgctgactacaactacaaactgcctgatgacttcacaggctgtgtgattgcctggaacagcaacaacctggacagcaaggtgggaggcaactacaactacaggtacagactgttcaggaagagcaacctgaaaccatttgagagggacatcagcacagagatttaccaggctggcagcaagccatgtaatggagtggagggcttcaactgttactttccactccaatcctatggcttccaaccaaccaatggagtgggctaccaaccatacagggtggtggtgctgtcctttgaactgctccatgcccctgccacagtgtgtggaccaaagaagagcaccaacctggtgaagaacaagtgtgtgaacttcaacttcaatggactgacaggcacaggagtgctgacagagagcaacaagaagttcctgccattccaacagtttggcagggacattgctgacaccacagatgctgtgagggacccacagaccttggagattctggacatcacaccatgttcctttggaggagtgtctgtgattacacctggcaccaacaccagcaaccaggtggctgtgctctaccagggcgtgaactgtactgaggtgcctgtggctatccatgctgaccaacttacaccaacctggagggtctacagcacaggaagcaacgtgttccagaccagggctggctgtctgattggagcagagcatgtgaacaactcctatgagtgtgacatcccaattggagcaggcatctgtgcctcctaccagacccagaccaacagcaggggctctgcatcttgactcgagctggtactgcatgcacgcaatgctagctgcccctttcccgtcctgggtaccccgagtctcccccgacctcgggtcccaggtatgctcccacctccacctgccccactcaccacctctgctagttccagacacctcccaagcacgcagcaatgcagctcaaaacgcttagcctagccacacccccacgggaaacagcagtgattaacctttagcaataaacgaaagtttaactaagctatactaaccccagggttggtcaatttcgtgccagccacaccctggagctagcaaaccgctgatcagcctcgactgtgccttctagttgccagccatctgttgtttgcccctcccccgtgccttccttgaccctggaaggtgccactcccactgtcctttcctaataaaatgaggaaattgcatcgcattgtctgagtaggtgtcattctattctggggggtggggtggggcaggacagcaagggggaggattgggaagacaatagcaggcatgctggggatgcggtgggctctatggcttctgaggcggaaagaaccagctggggctctagggggtatccccacgcgccctgtagcggcgcattaagcgcggcgggtgtggtggttacgcgcagcgtgaccgctacacttgccagcgccctagcgcccgctcctttcgctttcttcccttcctttctcgccacgttcgccggctttccccgtcaagctctaaatcgggggctccctttagggttccgatttagtgctttacggcacctcgaccccaaaaaacttgattagggtgatggttcacgtagtgggccatcgccctgatagacggtttttcgccctttgacgttggagtccacgttctttaatagtggactcttgttccaaactggaacaacactcaaccctatctcggtctattcttttgatttataagggattttgccgatttcggcctattggttaaaaaatgagctgatttaacaaaaatttaacgcgaattaattctgtggaatgtgtgtcagttagggtgtggaaagtccccaggctccccagcaggcagaagtatgcaaagcatgcatctcaattagtcagcaaccaggtgtggaaagtccccaggctccccagcaggcagaagtatgcaaagcatgcatctcaattagtcagcaaccatagtcccgcccctaactccgcccatcccgcccctaactccgcccagttccgcccattctccgccccatggctgactaattttttttatttatgcagaggccgaggccgcctctgcctctgagctattccagaagtagtgaggaggcttttttggaggcctaggcttttgcaaaaagctcccgggagcttgtatatccattttcggatctgatcaagagacaggatgaggatcgtttcgcatgattgaacaagatggattgcacgcaggttctccggccgcttgggtggagaggctattcggctatgactgggcacaacagacaatcggctgctctgatgccgccgtgttccggctgtcagcgcaggggcgcccggttctttttgtcaagaccgacctgtccggtgccctgaatgaactgcaggacgaggcagcgcggctatcgtggctggccacgacgggcgttccttgcgcagctgtgctcgacgttgtcactgaagcgggaagggactggctgctattgggcgaagtgccggggcaggatctcctgtcatctcaccttgctcctgccgagaaagtatccatcatggctgatgcaatgcggcggctgcatacgcttgatccggctacctgcccattcgaccaccaagcgaaacatcgcatcgagcgagcacgtactcggatggaagccggtcttgtcgatcaggatgatctggacgaagagcatcaggggctcgcgccagccgaactgttcgccaggctcaaggcgcgcatgcccgacggcgaggatctcgtcgtgacccatggcgatgcctgcttgccgaatatcatggtggaaaatggccgcttttctggattcatcgactgtggccggctgggtgtggcggaccgctatcaggacatagcgttggctacccgtgatattgctgaagagcttggcggcgaatgggctgaccgcttcctcgtgctttacggtatcgccgctcccgattcgcagcgcatcgccttctatcgccttcttgacgagttcttctgagcgggactctggggttcgaaatgaccgaccaagcgacgcccaacctgccatcacgagatttcgattccaccgccgccttctatgaaaggttgggcttcggaatcgttttccgggacgccggctggatgatcctccagcgcggggatctcatgctggagttcttcgcccaccccaacttgtttattgcagcttataatggttacaaataaagcaatagcatcacaaatttcacaaataaagcatttttttcactgcattctagttgtggtttgtccaaactcatcaatgtatcttatcatgtctgtataccgtcgacctctagctagagcttggcgtaatcatggtcatagctgtttcctgtgtgaaattgttatccgctcacaattccacacaacatacgagccggaagcataaagtgtaaagcctggggtgcctaatgagtgagctaactcacattaattgcgttgcgctcactgcccgctttccagtcgggaaacctgtcgtgccagctgcattaatgaatcggccaacgcgcggggagaggcggtttgcgtattgggcgctcttccgcttcctcgctcactgactcgctgcgctcggtcgttcggctgcggcgagcggtatcagctcactcaaaggcggtaatacggttatccacagaatcaggggataacgcaggaaagaacatgtgagcaaaaggccagcaaaaggccaggaaccgtaaaaaggccgcgttgctggcgtttttccataggctccgcccccctgacgagcatcacaaaaatcgacgctcaagtcagaggtggcgaaacccgacaggactataaagataccaggcgtttccccctggaagctccctcgtgcgctctcctgttccgaccctgccgcttaccggatacctgtccgcctttctcccttcgggaagcgtggcgctttctcatagctcacgctgtaggtatctcagttcggtgtaggtcgttcgctccaagctgggctgtgtgcacgaaccccccgttcagcccgaccgctgcgccttatccggtaactatcgtcttgagtccaacccggtaagacacgacttatcgccactggcagcagccactggtaacaggattagcagagcgaggtatgtaggcggtgctacagagttcttgaagtggtggcctaactacggctacactagaagaacagtatttggtatctgcgctctgctgaagccagttaccttcggaaaaagagttggtagctcttgatccggcaaacaaaccaccgctggtagcggtggtttttttgtttgcaagcagcagattacgcgcagaaaaaaaggatctcaagaagatcctttgatcttttctacggggtctgacgctcagtggaacgaaaactcacgttaagggattttggtcatgagattatcaaaaaggatcttcacctagatccttttaaattaaaaatgaagttttaaatcaatctaaagtatatatgagtaaacttggtctgacagttaccaatgcttaatcagtgaggcacctatctcagcgatctgtctatttcgttcatccatagttgcctgactccccgtcgtgtagataactacgatacgggagggcttaccatctggccccagtgctgcaatgataccgcgagacccacgctcaccggctccagatttatcagcaataaaccagccagccggaagggccgagcgcagaagtggtcctgcaactttatccgcctccatccagtctattaattgttgccgggaagctagagtaagtagttcgccagttaatagtttgcgcaacgttgttgccattgctacaggcatcgtggtgtcacgctcgtcgtttggtatggcttcattcagctccggttcccaacgatcaaggcgagttacatgatcccccatgttgtgcaaaaaagcggttagctccttcggtcctccgatcgttgtcagaagtaagttggccgcagtgttatcactcatggttatggcagcactgcataattctcttactgtcatgccatccgtaagatgcttttctgtgactggtgagtactcaaccaagtcattctgagaatagtgtatgcggcgaccgagttgctcttgcccggcgtcaatacgggataataccgcgccacatagcagaactttaaaagtgctcatcattggaaaacgttcttcggggcgaaaactctcaaggatcttaccgctgttgagatccagttcgatgtaacccactcgtgcacccaactgatcttcagcatcttttactttcaccagcgtttctgggtgagcaaaaacaggaaggcaaaatgccgcaaaaaagggaataagggcgacacggaaatgttgaatactcatactcttcctttttcaatattattgaagcatttatcagggttattgtctcatgagcggatacatatttgaatgtatttagaaaaataaacaaataggggttccgcgcacatttccccgaaaagtgccacctgacgtc

SEQ ID NO: 94 - DNA, 9430 bp, synthetic construct
  misc_feature 1..9430: note pZV12_SARS-CoV-2-UTR-spike_delta_HexaPro_SPY_tag_S314_RBD_S 683_T2A_SARS_RBD_T2A_MERS_RBD
  source 1..9430: mol_type = other DNA
gacggatcgggagatctcccgatcccctatggtgcactctcagtacaatctgctctgatgccgcatagttaagccagtatctgctccctgcttgtgtgttggaggtcgctgagtagtgcgcgagcaaaatttaagctacaacaaggcaaggcttgaccgacaattgcatgaagaatctgcttagggttaggcgttttgcgctgcttcgcgatgtacgggccagatatacgcgttgacattgattattgactagttattaatagtaatcaattacggggtcattagttcatagcccatatatggagttccgcgttacataacttacggtaaatggcccgcctggctgaccgcccaacgacccccgcccattgacgtcaataatgacgtatgttcccatagtaacgccaatagggactttccattgacgtcaatgggtggagtatttacggtaaactgcccacttggcagtacatcaagtgtatcatatgccaagtacgccccctattgacgtcaatgacggtaaatggcccgcctggcattatgcccagtacatgaccttatgggactttcctacttggcagtacatctacgtattagtcatcgctattaccatggtgatgcggttttggcagtacatcaatgggcgtggatagcggtttgactcacggggatttccaagtctccaccccattgacgtcaatgggagtttgttttggcaccaaaatcaacgggactttccaaaatgtcgtaacaactccgccccattgacgcaaatgggcggtaggcgtgtacggtgggaggtctatataagcagagctctctggctaactagagaacccactgcttactggcttatcgaaattaatacgactcactatagggagacccaagctggctagccaccgagaataaactagtattcttctggtccccacagactcagagagaacccgccaccatgtttgtgttcctggtgctgctgccactggtgtccagccgtggcgtgcctcatatcgtgatggtggacgcctacaagcgttacaagagcaacttcagggtccaaccaacagagagcattgtgaggtttccaaacatcaccaacctgtgtccatttggagaggtgttcaatgccaccaggtttgcctctgtctatgcctggaacaggaagaggattagcaactgtgtggctgactactctgtgctctacaactctgcctccttcagcaccttcaagtgttatggagtgagcccaaccaaactgaatgacctgtgtttcaccaatgtctatgctgactcctttgtgattaggggagatgaggtgagacagattgcccctggacaaacaggcaagattgctgactacaactacaaactgcctgatgacttcacaggctgtgtgattgcctggaacagcaacaacctggacagcaaggtgggaggcaactacaactacaggtacagactgttcaggaagagcaacctgaaaccatttgagagggacatcagcacagagatttaccaggctggcagcaagccatgtaatggagtggagggcttcaactgttactttccactccaatcctatggcttccaaccaaccaatggagtgggctaccaaccatacagggtggtggtgctgtcctttgaactgctccatgcccctgccacagtgtgtggaccaaagaagagcaccaacctggtgaagaacaagtgtgtgaacttcaacttcaatggactgacaggcacaggagtgctgacagagagcaacaagaagttcctgccattccaacagtttggcagggacattgctgacaccacagatgctgtgagggacccacagaccttggagattctggacatcacaccatgttcctttggaggagtgtctgtgattacacctggcaccaacaccagcaaccaggtggctgtgctctaccagggcgtgaactgtactgaggtgcctgtggctatccatgctgaccaacttacaccaacctggagggtctacagcacaggaagcaacgtgttccagaccagggctggctgtctgattggagcagagcatgtgaacaactcctatgagtgtgacatcccaattggagcaggcatctgtgcctcctaccagacccagaccaacagcaggggctctgcatctggctccggcgagggcagaggcagtctgctgacatgcggtgacgtggaagagaatcccggccctatgtttgtgttcctggtgctgctgccactggtgtccagccgtggcgtgcctcatatcgtgatggtggacgcctacaagcgttacaagagcaacttcagggtggtgccatctggagatgtggtgaggtttccaaacatcaccaacctgtgtccatttggagaggtgttcaatgccaccaagtttccatctgtctatgcctgggagaggaagaagattagcaactgtgtggctgactactctgtgctctacaacagcaccttcttcagcaccttcaagtgttatggagtgtctgccaccaaactgaatgacctgtgtttcagcaatgtctatgctgactcctttgtggtgaagggagatgatgtgagacagattgcccctggacaaacaggagtgattgctgactacaactacaaactgcctgatgactttatgggctgtgtgctggcttggaacaccaggaacattgatgccaccagcacaggcaactacaactacaaatacagatacctgagacatggcaaactgagaccatttgagagggacatcagcaatgtgccattcagccctgatggcaagccatgtactcctcctgccctgaactgttactggccactgaatgactatggcttctacaccaccacaggcattggctaccaaccatacagggtggtggtgctgtcctttgaactgctgaatgcccctgccacagtgtgtggaccaaaaaagagcaccaacctggtgaagaacaagtgtgtgaacttcaacttcaatggactgacaggcacaggagtgctgacagagagcaacaagaagttcctgccattccaacagtttggcagggacattgctgacaccacagatgctgtgagggacccacagaccttggagattctggacatcacaccatgttcctttggaggagtgtctgtgattacacctggcaccaacaccagcaaccaggtggctgtgctctaccagggcgtgaactgtactgaggtgcctgtggctatccatgctgaccaacttacaccaacctggagggtctacagcacaggaagcaacgtgttccagaccagggctggctgtctgattggagcagagcatgtgaacaactcctatgagtgtgacatcccaattggagcaggcatctgtgcctcctaccagacccagaccaacagcaggggctctgcatctggctccggcgagggcagaggcagtctgctgacatgcggtgacgtggaagagaatcccggccctatgtttgtgttcctggtgctgctgccactggtgtccagccgtggcgtgcctcatatcgtgatggtggacgcctacaagcgttacaagagcaacttcgaggctaagccatctggctctgtggtggaacaggctgagggagtggagtgtgacttcagcccactgctgtctggcacacctccacaggtctacaacttcaagagactggtgttcaccaactgtaactacaacctgaccaaactgctgtccctgttctctgtgaatgacttcacttgtagccagattagccctgctgccattgccagcaactgttactcctccctgattctggactacttctcctacccactgagtatgaagtctgacctgtctgtgtcctctgctggaccaatcagccagttcaactacaagcagtccttcagcaacccaacttgtctgattctggctacagtgccacacaacctgaccaccatcaccaagccactgaaatactcctacatcaacaagtgtagcagactgctgtctgatgacaggacagaggtgccacaactagtgaatgccaaccaatacagcccatgtgtgagcattgtgccaagcacagtgtgggaggatggagactactacaggaagcaacttagcccattggagggaggaggctggctggtggcatctggcagcacagtggctatgacagaacaactccaaatgggctttggcatcacagtccaatatggcacagacaccaactctgtgtgtccaaaattgaagagcaccaacctggtgaagaacaagtgtgtgaacttcaacttcaatggactgacaggcacaggagtgctgacagagagcaacaagaagttcctgccattccaacagtttggcagggacattgctgacaccacagatgctgtgagggacccacagaccttggagattctggacatcacaccatgttcctttggaggagtgtctgtgattacacctggcaccaacaccagcaaccaggtggctgtgctctaccagggcgtgaactgtactgaggtgcctgtggctatccatgctgaccaacttacaccaacctggagggtctacagcacaggaagcaacgtgttccagaccagggctggctgtctgattggagcagagcatgtgaacaactcctatgagtgtgacatcccaattggagcaggcatctgtgcctcctaccagacccagaccaacagcaggggctctgcatcttgactcgagctggtactgcatgcacgcaatgctagctgcccctttcccgtcctgggtaccccgagtctcccccgacctcgggtcccaggtatgctcccacctccacctgccccactcaccacctctgctagttccagacacctcccaagcacgcagcaatgcagctcaaaacgcttagcctagccacacccccacgggaaacagcagtgattaacctttagcaataaacgaaagtttaactaagctatactaaccccagggttggtcaatttcgtgccagccacaccctggagctagcaaaccgctgatcagcctcgactgtgccttctagttgccagccatctgttgtttgcccctcccccgtgccttccttgaccctggaaggtgccactcccactgtcctttcctaataaaatgaggaaattgcatcgcattgtctgagtaggtgtcattctattctggggggtggggtggggcaggacagcaagggggaggattgggaagacaatagcaggcatgctggggatgcggtgggctctatggcttctgaggcggaaagaaccagctggggctctagggggtatccccacgcgccctgtagcggcgcattaagcgcggcgggtgtggtggttacgcgcagcgtgaccgctacacttgccagcgccctagcgcccgctcctttcgctttcttcccttcctttctcgccacgttcgccggctttccccgtcaagctctaaatcgggggctccctttagggttccgatttagtgctttacggcacctcgaccccaaaaaacttgattagggtgatggttcacgtagtgggccatcgccctgatagacggtttttcgccctttgacgttggagtccacgttctttaatagtggactcttgttccaaactggaacaacactcaaccctatctcggtctattcttttgatttataagggattttgccgatttcggcctattggttaaaaaatgagctgatttaacaaaaatttaacgcgaattaattctgtggaatgtgtgtcagttagggtgtggaaagtccccaggctccccagcaggcagaagtatgcaaagcatgcatctcaattagtcagcaaccaggtgtggaaagtccccaggctccccagcaggcagaagtatgcaaagcatgcatctcaattagtcagcaaccatagtcccgcccctaactccgcccatcccgcccctaactccgcccagttccgcccattctccgccccatggctgactaattttttttatttatgcagaggccgaggccgcctctgcctctgagctattccagaagtagtgaggaggcttttttggaggcctaggcttttgcaaaaagctcccgggagcttgtatatccattttcggatctgatcaagagacaggatgaggatcgtttcgcatgattgaacaagatggattgcacgcaggttctccggccgcttgggtggagaggctattcggctatgactgggcacaacagacaatcggctgctctgatgccgccgtgttccggctgtcagcgcaggggcgcccggttctttttgtcaagaccgacctgtccggtgccctgaatgaactgcaggacgaggcagcgcggctatcgtggctggccacgacgggcgttccttgcgcagctgtgctcgacgttgtcactgaagcgggaagggactggctgctattgggcgaagtgccggggcaggatctcctgtcatctcaccttgctcctgccgagaaagtatccatcatggctgatgcaatgcggcggctgcatacgcttgatccggctacctgcccattcgaccaccaagcgaaacatcgcatcgagcgagcacgtactcggatggaagccggtcttgtcgatcaggatgatctggacgaagagcatcaggggctcgcgccagccgaactgttcgccaggctcaaggcgcgcatgcccgacggcgaggatctcgtcgtgacccatggcgatgcctgcttgccgaatatcatggtggaaaatggccgcttttctggattcatcgactgtggccggctgggtgtggcggaccgctatcaggacatagcgttggctacccgtgatattgctgaagagcttggcggcgaatgggctgaccgcttcctcgtgctttacggtatcgccgctcccgattcgcagcgcatcgccttctatcgccttcttgacgagttcttctgagcgggactctggggttcgaaatgaccgaccaagcgacgcccaacctgccatcacgagatttcgattccaccgccgccttctatgaaaggttgggcttcggaatcgttttccgggacgccggctggatgatcctccagcgcggggatctcatgctggagttcttcgcccaccccaacttgtttattgcagcttataatggttacaaataaagcaatagcatcacaaatttcacaaataaagcatttttttcactgcattctagttgtggtttgtccaaactcatcaatgtatcttatcatgtctgtataccgtcgacctctagctagagcttggcgtaatcatggtcatagctgtttcctgtgtgaaattgttatccgctcacaattccacacaacatacgagccggaagcataaagtgtaaagcctggggtgcctaatgagtgagctaactcacattaattgcgttgcgctcactgcccgctttccagtcgggaaacctgtcgtgccagctgcattaatgaatcggccaacgcgcggggagaggcggtttgcgtattgggcgctcttccgcttcctcgctcactgactcgctgcgctcggtcgttcggctgcggcgagcggtatcagctcactcaaaggcggtaatacggttatccacagaatcaggggataacgcaggaaagaacatgtgagcaaaaggccagcaaaaggccaggaaccgtaaaaaggccgcgttgctggcgtttttccataggctccgcccccctgacgagcatcacaaaaatcgacgctcaagtcagaggtggcgaaacccgacaggactataaagataccaggcgtttccccctggaagctccctcgtgcgctctcctgttccgaccctgccgcttaccggatacctgtccgcctttctcccttcgggaagcgtggcgctttctcatagctcacgctgtaggtatctcagttcggtgtaggtcgttcgctccaagctgggctgtgtgcacgaaccccccgttcagcccgaccgctgcgccttatccggtaactatcgtcttgagtccaacccggtaagacacgacttatcgccactggcagcagccactggtaacaggattagcagagcgaggtatgtaggcggtgctacagagttcttgaagtggtggcctaactacggctacactagaagaacagtatttggtatctgcgctctgctgaagccagttaccttcggaaaaagagttggtagctcttgatccggcaaacaaaccaccgctggtagcggtggtttttttgtttgcaagcagcagattacgcgcagaaaaaaaggatctcaagaagatcctttgatcttttctacggggtctgacgctcagtggaacgaaaactcacgttaagggattttggtcatgagattatcaaaaaggatcttcacctagatccttttaaattaaaaatgaagttttaaatcaatctaaagtatatatgagtaaacttggtctgacagttaccaatgcttaatcagtgaggcacctatctcagcgatctgtctatttcgttcatccatagttgcctgactccccgtcgtgtagataactacgatacgggagggcttaccatctggccccagtgctgcaatgataccgcgagacccacgctcaccggctccagatttatcagcaataaaccagccagccggaagggccgagcgcagaagtggtcctgcaactttatccgcctccatccagtctattaattgttgccgggaagctagagtaagtagttcgccagttaatagtttgcgcaacgttgttgccattgctacaggcatcgtggtgtcacgctcgtcgtttggtatggcttcattcagctccggttcccaacgatcaaggcgagttacatgatcccccatgttgtgcaaaaaagcggttagctccttcggtcctccgatcgttgtcagaagtaagttggccgcagtgttatcactcatggttatggcagcactgcataattctcttactgtcatgccatccgtaagatgcttttctgtgactggtgagtactcaaccaagtcattctgagaatagtgtatgcggcgaccgagttgctcttgcccggcgtcaatacgggataataccgcgccacatagcagaactttaaaagtgctcatcattggaaaacgttcttcggggcgaaaactctcaaggatcttaccgctgttgagatccagttcgatgtaacccactcgtgcacccaactgatcttcagcatcttttactttcaccagcgtttctgggtgagcaaaaacaggaaggcaaaatgccgcaaaaaagggaataagggcgacacggaaatgttgaatactcatactcttcctttttcaatattattgaagcatttatcagggttattgtctcatgagcggatacatatttgaatgtatttagaaaaataaacaaataggggttccgcgcacatttccccgaaaagtgccacctgacgtc

SEQ ID NO: 95 - DNA, 8939 bp, synthetic construct
  misc_feature 1..8939: note = pMD119_pcDNA3.1_ecto-SARS-CoV-2_spike_VG40589-UT
  source 1..8939: mol_type = other DNA
gacggatcgggagatctcccgatcccctatggtgcactctcagtacaatctgctctgatgccgcatagttaagccagtatctgctccctgcttgtgtgttggaggtcgctgagtagtgcgcgagcaaaatttaagctacaacaaggcaaggcttgaccgacaattgcatgaagaatctgcttagggttaggcgttttgcgctgcttcgcgatgtacgggccagatatacgcgttgacattgattattgactagttattaatagtaatcaattacggggtcattagttcatagcccatatatggagttccgcgttacataacttacggtaaatggcccgcctggctgaccgcccaacgacccccgcccattgacgtcaataatgacgtatgttcccatagtaacgccaatagggactttccattgacgtcaatgggtggagtatttacggtaaactgcccacttggcagtacatcaagtgtatcatatgccaagtacgccccctattgacgtcaatgacggtaaatggcccgcctggcattatgcccagtacatgaccttatgggactttcctacttggcagtacatctacgtattagtcatcgctattaccatggtgatgcggttttggcagtacatcaatgggcgtggatagcggtttgactcacggggatttccaagtctccaccccattgacgtcaatgggagtttgttttggcaccaaaatcaacgggactttccaaaatgtcgtaacaactccgccccattgacgcaaatgggcggtaggcgtgtacggtgggaggtctatataagcagagctctctggctaactagagaacccactgcttactggcttatcgaaattaatacgactcactatagggagacccaagctggatgtttgtgttcctggtgctgctgccactggtgtccagccagtgtgtgaacctgaccaccaggacccaacttcctcctgcctacaccaactccttcaccaggggagtctactaccctgacaaggtgttcaggtcctctgtgctgcacagcacccaggacctgttcctgccattcttcagcaatgtgacctggttccatgccatccatgtgtctggcaccaatggcaccaagaggtttgacaaccctgtgctgccattcaatgatggagtctactttgccagcacagagaagagcaacatcatcaggggctggatttttggcaccaccctggacagcaagacccagtccctgctgattgtgaacaatgccaccaatgtggtgattaaggtgtgtgagttccagttctgtaatgacccattcctgggagtctactaccacaagaacaacaagtcctggatggagtctgagttcagggtctactcctctgccaacaactgtacctttgaatatgtgagccaaccattcctgatggacttggagggcaagcagggcaacttcaagaacctgagggagtttgtgttcaagaacattgatggctacttcaagatttacagcaaacacacaccaatcaacctggtgagggacctgccacagggcttctctgccttggaaccactggtggacctgccaattggcatcaacatcaccaggttccagaccctgctggctctgcacaggtcctacctgacacctggagactcctcctctggctggacagcaggagcagcagcctactatgtgggctacctccaaccaaggaccttcctgctgaaatacaatgagaatggcaccatcacagatgctgtggactgtgccctggacccactgtctgagaccaagtgtaccctgaaatccttcacagtggagaagggcatctaccagaccagcaacttcagggtccaaccaacagagagcattgtgaggtttccaaacatcaccaacctgtgtccatttggagaggtgttcaatgccaccaggtttgcctctgtctatgcctggaacaggaagaggattagcaactgtgtggctgactactctgtgctctacaactctgcctccttcagcaccttcaagtgttatggagtgagcccaaccaaactgaatgacctgtgtttcaccaatgtctatgctgactcctttgtgattaggggagatgaggtgagacagattgcccctggacaaacaggcaagattgctgactacaactacaaactgcctgatgacttcacaggctgtgtgattgcctggaacagcaacaacctggacagcaaggtgggaggcaactacaactacctctacagactgttcaggaagagcaacctgaaaccatttgagagggacatcagcacagagatttaccaggctggcagcacaccatgtaatggagtggagggcttcaactgttactttccactccaatcctatggcttccaaccaaccaatggagtgggctaccaaccatacagggtggtggtgctgtcctttgaactgctccatgcccctgccacagtgtgtggaccaaagaagagcaccaacctggtgaagaacaagtgtgtgaacttcaacttcaatggactgacaggcacaggagtgctgacagagagcaacaagaagttcctgccattccaacagtttggcagggacattgctgacaccacagatgctgtgagggacccacagaccttggagattctggacatcacaccatgttcctttggaggagtgtctgtgattacacctggcaccaacaccagcaaccaggtggctgtgctctaccaggatgtgaactgtactgaggtgcctgtggctatccatgctgaccaacttacaccaacctggagggtctacagcacaggcagcaatgtgttccagaccagggctggctgtctgattggagcagagcatgtgaacaactcctatgagtgtgacatcccaattggagcaggcatctgtgcctcctaccagacccagaccaacagcccaaggagggcaaggtctgtggcaagccagagcatcattgcctacacaatgagtctgggagcagagaactctgtggcttacagcaacaacagcattgccatcccaaccaacttcaccatctctgtgaccacagagattctgcctgtgagtatgaccaagacctctgtggactgtacaatgtatatctgtggagacagcacagagtgtagcaacctgctgctccaatatggctccttctgtacccaacttaacagggctctgacaggcattgctgtggaacaggacaagaacacccaggaggtgtttgcccaggtgaagcagatttacaagacacctccaatcaaggactttggaggcttcaacttcagccagattctgcctgacccaagcaagccaagcaagaggtccttcattgaggacctgctgttcaacaaggtgaccctggctgatgctggcttcatcaagcaatatggagactgtctgggagacattgctgccagggacctgatttgtgcccagaagttcaatggactgacagtgctgcctccactgctgacagatgagatgattgcccaatacacctctgccctgctggctggcaccatcacctctggctggacctttggagcaggagcagccctccaaatcccatttgctatgcagatggcttacaggttcaatggcattggagtgacccagaatgtgctctatgagaaccagaaactgattgccaaccagttcaactctgccattggcaagattcaggactccctgtccagcacagcctctgccctgggcaaactccaagatgtggtgaaccagaatgcccaggctctgaacaccctggtgaagcaactttccagcaactttggagccatctcctctgtgctgaatgacatcctgagcagactggacaaggtggaggctgaggtccagattgacagactgattacaggcagactccaatccctccaaacctatgtgacccaacaacttatcagggctgctgagattagggcatctgccaacctggctgccaccaagatgagtgagtgtgtgctgggacaaagcaagagggtggacttctgtggcaagggctaccacctgatgagttttccacagtctgcccctcatggagtggtgttcctgcatgtgacctatgtgcctgcccaggagaagaacttcaccacagcccctgccatctgccatgatggcaaggctcactttccaagggagggagtgtttgtgagcaatggcacccactggtttgtgacccagaggaacttctatgaaccacagattatcaccacagacaacacctttgtgtctggcaactgtgatgtggtgattggcattgtgaacaacacagtctatgacccactccaacctgaactggactccttcaaggaggaactggacaaatacttcaagaaccacaccagccctgatgtggacctgggagacatctctggcatcaatgcctctgtggtgaacatccagaaggagattgacagactgaatgaggtggctaagaacctgaatgagtccctgattgacctccaagaactgggcaaataagtttaaacccgctgatcagcctcgactgtgccttctagttgccagccatctgttgtttgcccctcccccgtgccttccttgaccctggaaggtgccactcccactgtcctttcctaataaaatgaggaaattgcatcgcattgtctgagtaggtgtcattctattctggggggtggggtggggcaggacagcaagggggaggattgggaagacaatagcaggcatgctggggatgcggtgggctctatggcttctgaggcggaaagaaccagctggggctctagggggtatccccacgcgccctgtagcggcgcattaagcgcggcgggtgtggtggttacgcgcagcgtgaccgctacacttgccagcgccctagcgcccgctcctttcgctttcttcccttcctttctcgccacgttcgccggctttccccgtcaagctctaaatcgggggctccctttagggttccgatttagtgctttacggcacctcgaccccaaaaaacttgattagggtgatggttcacgtagtgggccatcgccctgatagacggtttttcgccctttgacgttggagtccacgttctttaatagtggactcttgttccaaactggaacaacactcaaccctatctcggtctattcttttgatttataagggattttgccgatttcggcctattggttaaaaaatgagctgatttaacaaaaatttaacgcgaattaattctgtggaatgtgtgtcagttagggtgtggaaagtccccaggctccccagcaggcagaagtatgcaaagcatgcatctcaattagtcagcaaccaggtgtggaaagtccccaggctccccagcaggcagaagtatgcaaagcatgcatctcaattagtcagcaaccatagtcccgcccctaactccgcccatcccgcccctaactccgcccagttccgcccattctccgccccatggctgactaattttttttatttatgcagaggccgaggccgcctctgcctctgagctattccagaagtagtgaggaggcttttttggaggcctaggcttttgcaaaaagctcccgggagcttgtatatccattttcggatctgatcaagagacaggatgaggatcgtttcgcatgattgaacaagatggattgcacgcaggttctccggccgcttgggtggagaggctattcggctatgactgggcacaacagacaatcggctgctctgatgccgccgtgttccggctgtcagcgcaggggcgcccggttctttttgtcaagaccgacctgtccggtgccctgaatgaactgcaggacgaggcagcgcggctatcgtggctggccacgacgggcgttccttgcgcagctgtgctcgacgttgtcactgaagcgggaagggactggctgctattgggcgaagtgccggggcaggatctcctgtcatctcaccttgctcctgccgagaaagtatccatcatggctgatgcaatgcggcggctgcatacgcttgatccggctacctgcccattcgaccaccaagcgaaacatcgcatcgagcgagcacgtactcggatggaagccggtcttgtcgatcaggatgatctggacgaagagcatcaggggctcgcgccagccgaactgttcgccaggctcaaggcgcgcatgcccgacggcgaggatctcgtcgtgacccatggcgatgcctgcttgccgaatatcatggtggaaaatggccgcttttctggattcatcgactgtggccggctgggtgtggcggaccgctatcaggacatagcgttggctacccgtgatattgctgaagagcttggcggcgaatgggctgaccgcttcctcgtgctttacggtatcgccgctcccgattcgcagcgcatcgccttctatcgccttcttgacgagttcttctgagcgggactctggggttcgaaatgaccgaccaagcgacgcccaacctgccatcacgagatttcgattccaccgccgccttctatgaaaggttgggcttcggaatcgttttccgggacgccggctggatgatcctccagcgcggggatctcatgctggagttcttcgcccaccccaacttgtttattgcagcttataatggttacaaataaagcaatagcatcacaaatttcacaaataaagcatttttttcactgcattctagttgtggtttgtccaaactcatcaatgtatcttatcatgtctgtataccgtcgacctctagctagagcttggcgtaatcatggtcatagctgtttcctgtgtgaaattgttatccgctcacaattccacacaacatacgagccggaagcataaagtgtaaagcctggggtgcctaatgagtgagctaactcacattaattgcgttgcgctcactgcccgctttccagtcgggaaacctgtcgtgccagctgcattaatgaatcggccaacgcgcggggagaggcggtttgcgtattgggcgctcttccgcttcctcgctcactgactcgctgcgctcggtcgttcggctgcggcgagcggtatcagctcactcaaaggcggtaatacggttatccacagaatcaggggataacgcaggaaagaacatgtgagcaaaaggccagcaaaaggccaggaaccgtaaaaaggccgcgttgctggcgtttttccataggctccgcccccctgacgagcatcacaaaaatcgacgctcaagtcagaggtggcgaaacccgacaggactataaagataccaggcgtttccccctggaagctccctcgtgcgctctcctgttccgaccctgccgcttaccggatacctgtccgcctttctcccttcgggaagcgtggcgctttctcatagctcacgctgtaggtatctcagttcggtgtaggtcgttcgctccaagctgggctgtgtgcacgaaccccccgttcagcccgaccgctgcgccttatccggtaactatcgtcttgagtccaacccggtaagacacgacttatcgccactggcagcagccactggtaacaggattagcagagcgaggtatgtaggcggtgctacagagttcttgaagtggtggcctaactacggctacactagaagaacagtatttggtatctgcgctctgctgaagccagttaccttcggaaaaagagttggtagctcttgatccggcaaacaaaccaccgctggtagcggtttttttgtttgcaagcagcagattacgcgcagaaaaaaaggatctcaagaagatcctttgatcttttctacggggtctgacgctcagtggaacgaaaactcacgttaagggattttggtcatgagattatcaaaaaggatcttcacctagatccttttaaattaaaaatgaagttttaaatcaatctaaagtatatatgagtaaacttggtctgacagttaccaatgcttaatcagtgaggcacctatctcagcgatctgtctatttcgttcatccatagttgcctgactccccgtcgtgtagataactacgatacgggagggcttaccatctggccccagtgctgcaatgataccgcgagacccacgctcaccggctccagatttatcagcaataaaccagccagccggaagggccgagcgcagaagtggtcctgcaactttatccgcctccatccagtctattaattgttgccgggaagctagagtaagtagttcgccagttaatagtttgcgcaacgttgttgccattgctacaggcatcgtggtgtcacgctcgtcgtttggtatggcttcattcagctccggttcccaacgatcaaggcgagttacatgatcccccatgttgtgcaaaaaagcggttagctccttcggtcctccgatcgttgtcagaagtaagttggccgcagtgttatcactcatggttatggcagcactgcataattctcttactgtcatgccatccgtaagatgcttttctgtgactggtgagtactcaaccaagtcattctgagaatagtgtatgcggcgaccgagttgctcttgcccggcgtcaatacgggataataccgcgccacatagcagaactttaaaagtgctcatcattggaaaacgttcttcggggcgaaaactctcaaggatcttaccgctgttgagatccagttcgatgtaacccactcgtgcacccaactgatcttcagcatcttttactttcaccagcgtttctgggtgagcaaaaacaggaaggcaaaatgccgcaaaaaagggaataagggcgacacggaaatgttgaatactcatactcttcctttttcaatattattgaagcatttatcagggttattgtctcatgagcggatacatatttgaatgtatttagaaaaataaacaaataggggttccgcgcacatttccccgaaaagtgccacctgacgtc

SEQ ID NO: 96 - DNA, 9143 bp, synthetic construct
  misc_feature 1..9143: note = pMD120_pcDNA3.1_SARS-CoV-2_spike_VG40589-UT
  source 1..9143: mol_type = other DNA
gacggatcgggagatctcccgatcccctatggtgcactctcagtacaatctgctctgatgccgcatagttaagccagtatctgctccctgcttgtgtgttggaggtcgctgagtagtgcgcgagcaaaatttaagctacaacaaggcaaggcttgaccgacaattgcatgaagaatctgcttagggttaggcgttttgcgctgcttcgcgatgtacgggccagatatacgcgttgacattgattattgactagttattaatagtaatcaattacggggtcattagttcatagcccatatatggagttccgcgttacataacttacggtaaatggcccgcctggctgaccgcccaacgacccccgcccattgacgtcaataatgacgtatgttcccatagtaacgccaatagggactttccattgacgtcaatgggtggagtatttacggtaaactgcccacttggcagtacatcaagtgtatcatatgccaagtacgccccctattgacgtcaatgacggtaaatggcccgcctggcattatgcccagtacatgaccttatgggactttcctacttggcagtacatctacgtattagtcatcgctattaccatggtgatgcggttttggcagtacatcaatgggcgtggatagcggtttgactcacggggatttccaagtctccaccccattgacgtcaatgggagtttgttttggcaccaaaatcaacgggactttccaaaatgtcgtaacaactccgccccattgacgcaaatgggcggtaggcgtgtacggtgggaggtctatataagcagagctctctggctaactagagaacccactgcttactggcttatcgaaattaatacgactcactatagggagacccaagctggatgtttgtgttcctggtgctgctgccactggtgtccagccagtgtgtgaacctgaccaccaggacccaacttcctcctgcctacaccaactccttcaccaggggagtctactaccctgacaaggtgttcaggtcctctgtgctgcacagcacccaggacctgttcctgccattcttcagcaatgtgacctggttccatgccatccatgtgtctggcaccaatggcaccaagaggtttgacaaccctgtgctgccattcaatgatggagtctactttgccagcacagagaagagcaacatcatcaggggctggatttttggcaccaccctggacagcaagacccagtccctgctgattgtgaacaatgccaccaatgtggtgattaaggtgtgtgagttccagttctgtaatgacccattcctgggagtctactaccacaagaacaacaagtcctggatggagtctgagttcagggtctactcctctgccaacaactgtacctttgaatatgtgagccaaccattcctgatggacttggagggcaagcagggcaacttcaagaacctgagggagtttgtgttcaagaacattgatggctacttcaagatttacagcaaacacacaccaatcaacctggtgagggacctgccacagggcttctctgccttggaaccactggtggacctgccaattggcatcaacatcaccaggttccagaccctgctggctctgcacaggtcctacctgacacctggagactcctcctctggctggacagcaggagcagcagcctactatgtgggctacctccaaccaaggaccttcctgctgaaatacaatgagaatggcaccatcacagatgctgtggactgtgccctggacccactgtctgagaccaagtgtaccctgaaatccttcacagtggagaagggcatctaccagaccagcaacttcagggtccaaccaacagagagcattgtgaggtttccaaacatcaccaacctgtgtccatttggagaggtgttcaatgccaccaggtttgcctctgtctatgcctggaacaggaagaggattagcaactgtgtggctgactactctgtgctctacaactctgcctccttcagcaccttcaagtgttatggagtgagcccaaccaaactgaatgacctgtgtttcaccaatgtctatgctgactcctttgtgattaggggagatgaggtgagacagattgcccctggacaaacaggcaagattgctgactacaactacaaactgcctgatgacttcacaggctgtgtgattgcctggaacagcaacaacctggacagcaaggtgggaggcaactacaactacctctacagactgttcaggaagagcaacctgaaaccatttgagagggacatcagcacagagatttaccaggctggcagcacaccatgtaatggagtggagggcttcaactgttactttccactccaatcctatggcttccaaccaaccaatggagtgggctaccaaccatacagggtggtggtgctgtcctttgaactgctccatgcccctgccacagtgtgtggaccaaagaagagcaccaacctggtgaagaacaagtgtgtgaacttcaacttcaatggactgacaggcacaggagtgctgacagagagcaacaagaagttcctgccattccaacagtttggcagggacattgctgacaccacagatgctgtgagggacccacagaccttggagattctggacatcacaccatgttcctttggaggagtgtctgtgattacacctggcaccaacaccagcaaccaggtggctgtgctctaccaggatgtgaactgtactgaggtgcctgtggctatccatgctgaccaacttacaccaacctggagggtctacagcacaggcagcaatgtgttccagaccagggctggctgtctgattggagcagagcatgtgaacaactcctatgagtgtgacatcccaattggagcaggcatctgtgcctcctaccagacccagaccaacagcccaaggagggcaaggtctgtggcaagccagagcatcattgcctacacaatgagtctgggagcagagaactctgtggcttacagcaacaacagcattgccatcccaaccaacttcaccatctctgtgaccacagagattctgcctgtgagtatgaccaagacctctgtggactgtacaatgtatatctgtggagacagcacagagtgtagcaacctgctgctccaatatggctccttctgtacccaacttaacagggctctgacaggcattgctgtggaacaggacaagaacacccaggaggtgtttgcccaggtgaagcagatttacaagacacctccaatcaaggactttggaggcttcaacttcagccagattctgcctgacccaagcaagccaagcaagaggtccttcattgaggacctgctgttcaacaaggtgaccctggctgatgctggcttcatcaagcaatatggagactgtctgggagacattgctgccagggacctgatttgtgcccagaagttcaatggactgacagtgctgcctccactgctgacagatgagatgattgcccaatacacctctgccctgctggctggcaccatcacctctggctggacctttggagcaggagcagccctccaaatcccatttgctatgcagatggcttacaggttcaatggcattggagtgacccagaatgtgctctatgagaaccagaaactgattgccaaccagttcaactctgccattggcaagattcaggactccctgtccagcacagcctctgccctgggcaaactccaagatgtggtgaaccagaatgcccaggctctgaacaccctggtgaagcaactttccagcaactttggagccatctcctctgtgctgaatgacatcctgagcagactggacaaggtggaggctgaggtccagattgacagactgattacaggcagactccaatccctccaaacctatgtgacccaacaacttatcagggctgctgagattagggcatctgccaacctggctgccaccaagatgagtgagtgtgtgctgggacaaagcaagagggtggacttctgtggcaagggctaccacctgatgagttttccacagtctgcccctcatggagtggtgttcctgcatgtgacctatgtgcctgcccaggagaagaacttcaccacagcccctgccatctgccatgatggcaaggctcactttccaagggagggagtgtttgtgagcaatggcacccactggtttgtgacccagaggaacttctatgaaccacagattatcaccacagacaacacctttgtgtctggcaactgtgatgtggtgattggcattgtgaacaacacagtctatgacccactccaacctgaactggactccttcaaggaggaactggacaaatacttcaagaaccacaccagccctgatgtggacctgggagacatctctggcatcaatgcctctgtggtgaacatccagaaggagattgacagactgaatgaggtggctaagaacctgaatgagtccctgattgacctccaagaactgggcaaatatgaacaatacatcaagtggccatggtacatctggctgggcttcattgctggactgattgccattgtgatggtgaccataatgctgtgttgtatgacctcctgttgttcctgtctgaaaggctgttgttcctgtggctcctgttgtaagtttgatgaggatgactctgaacctgtgctgaaaggagtgaaactgcactacacctgagtttaaacccgctgatcagcctcgactgtgccttctagttgccagccatctgttgtttgcccctcccccgtgccttccttgaccctggaaggtgccactcccactgtcctttcctaataaaatgaggaaattgcatcgcattgtctgagtaggtgtcattctattctggggggtggggtggggcaggacagcaagggggaggattgggaagacaatagcaggcatgctggggatgcggtgggctctatggcttctgaggcggaaagaaccagctggggctctagggggtatccccacgcgccctgtagcggcgcattaagcgcggcgggtgtggtggttacgcgcagcgtgaccgctacacttgccagcgccctagcgcccgctcctttcgctttcttcccttcctttctcgccacgttcgccggctttccccgtcaagctctaaatcgggggctccctttagggttccgatttagtgctttacggcacctcgaccccaaaaaacttgattagggtgatggttcacgtagtgggccatcgccctgatagacggtttttcgccctttgacgttggagtccacgttctttaatagtggactcttgttccaaactggaacaacactcaaccctatctcggtctattcttttgatttataagggattttgccgatttcggcctattggttaaaaaatgagctgatttaacaaaaatttaacgcgaattaattctgtggaatgtgtgtcagttagggtgtggaaagtccccaggctccccagcaggcagaagtatgcaaagcatgcatctcaattagtcagcaaccaggtgtggaaagtccccaggctccccagcaggcagaagtatgcaaagcatgcatctcaattagtcagcaaccatagtcccgcccctaactccgcccatcccgcccctaactccgcccagttccgcccattctccgccccatggctgactaattttttttatttatgcagaggccgaggccgcctctgcctctgagctattccagaagtagtgaggaggcttttttggaggcctaggcttttgcaaaaagctcccgggagcttgtatatccattttcggatctgatcaagagacaggatgaggatcgtttcgcatgattgaacaagatggattgcacgcaggttctccggccgcttgggtggagaggctattcggctatgactgggcacaacagacaatcggctgctctgatgccgccgtgttccggctgtcagcgcaggggcgcccggttctttttgtcaagaccgacctgtccggtgccctgaatgaactgcaggacgaggcagcgcggctatcgtggctggccacgacgggcgttccttgcgcagctgtgctcgacgttgtcactgaagcgggaagggactggctgctattgggcgaagtgccggggcaggatctcctgtcatctcaccttgctcctgccgagaaagtatccatcatggctgatgcaatgcggcggctgcatacgcttgatccggctacctgcccattcgaccaccaagcgaaacatcgcatcgagcgagcacgtactcggatggaagccggtcttgtcgatcaggatgatctggacgaagagcatcaggggctcgcgccagccgaactgttcgccaggctcaaggcgcgcatgcccgacggcgaggatctcgtcgtgacccatggcgatgcctgcttgccgaatatcatggtggaaaatggccgcttttctggattcatcgactgtggccggctgggtgtggcggaccgctatcaggacatagcgttggctacccgtgatattgctgaagagcttggcggcgaatgggctgaccgcttcctcgtgctttacggtatcgccgctcccgattcgcagcgcatcgccttctatcgccttcttgacgagttcttctgagcgggactctggggttcgaaatgaccgaccaagcgacgcccaacctgccatcacgagatttcgattccaccgccgccttctatgaaaggttgggcttcggaatcgttttccgggacgccggctggatgatcctccagcgcggggatctcatgctggagttcttcgcccaccccaacttgtttattgcagcttataatggttacaaataaagcaatagcatcacaaatttcacaaataaagcatttttttcactgcattctagttgtggtttgtccaaactcatcaatgtatcttatcatgtctgtataccgtcgacctctagctagagcttggcgtaatcatggtcatagctgtttcctgtgtgaaattgttatccgctcacaattccacacaacatacgagccggaagcataaagtgtaaagcctggggtgcctaatgagtgagctaactcacattaattgcgttgcgctcactgcccgctttccagtcgggaaacctgtcgtgccagctgcattaatgaatcggccaacgcgcggggagaggcggtttgcgtattgggcgctcttccgcttcctcgctcactgactcgctgcgctcggtcgttcggctgcggcgagcggtatcagctcactcaaaggcggtaatacggttatccacagaatcaggggataacgcaggaaagaacatgtgagcaaaaggccagcaaaaggccaggaaccgtaaaaaggccgcgttgctggcgtttttccataggctccgcccccctgacgagcatcacaaaaatcgacgctcaagtcagaggtggcgaaacccgacaggactataaagataccaggcgtttccccctggaagctccctcgtgcgctctcctgttccgaccctgccgcttaccggatacctgtccgcctttctcccttcgggaagcgtggcgctttctcatagctcacgctgtaggtatctcagttcggtgtaggtcgttcgctccaagctgggctgtgtgcacgaaccccccgttcagcccgaccgctgcgccttatccggtaactatcgtcttgagtccaacccggtaagacacgacttatcgccactggcagcagccactggtaacaggattagcagagcgaggtatgtaggcggtgctacagagttcttgaagtggtggcctaactacggctacactagaagaacagtatttggtatctgcgctctgctgaagccagttaccttcggaaaaagagttggtagctcttgatccggcaaacaaaccaccgctggtagcggtttttttgtttgcaagcagcagattacgcgcagaaaaaaaggatctcaagaagatcctttgatcttttctacggggtctgacgctcagtggaacgaaaactcacgttaagggattttggtcatgagattatcaaaaaggatcttcacctagatccttttaaattaaaaatgaagttttaaatcaatctaaagtatatatgagtaaacttggtctgacagttaccaatgcttaatcagtgaggcacctatctcagcgatctgtctatttcgttcatccatagttgcctgactccccgtcgtgtagataactacgatacgggagggcttaccatctggccccagtgctgcaatgataccgcgagacccacgctcaccggctccagatttatcagcaataaaccagccagccggaagggccgagcgcagaagtggtcctgcaactttatccgcctccatccagtctattaattgttgccgggaagctagagtaagtagttcgccagttaatagtttgcgcaacgttgttgccattgctacaggcatcgtggtgtcacgctcgtcgtttggtatggcttcattcagctccggttcccaacgatcaaggcgagttacatgatcccccatgttgtgcaaaaaagcggttagctccttcggtcctccgatcgttgtcagaagtaagttggccgcagtgttatcactcatggttatggcagcactgcataattctcttactgtcatgccatccgtaagatgcttttctgtgactggtgagtactcaaccaagtcattctgagaatagtgtatgcggcgaccgagttgctcttgcccggcgtcaatacgggataataccgcgccacatagcagaactttaaaagtgctcatcattggaaaacgttcttcggggcgaaaactctcaaggatcttaccgctgttgagatccagttcgatgtaacccactcgtgcacccaactgatcttcagcatcttttactttcaccagcgtttctgggtgagcaaaaacaggaaggcaaaatgccgcaaaaaagggaataagggcgacacggaaatgttgaatactcatactcttcctttttcaatattattgaagcatttatcagggttattgtctcatgagcggatacatatttgaatgtatttagaaaaataaacaaataggggttccgcgcacatttccccgaaaagtgccacctgacgtc

SEQ ID NO: 97 - DNA, 9143 bp, synthetic construct
  misc_feature 1..9143: note = pMD121_pcDNA3_SARS-CoV-2_spike_mut_v1
  source 1..9143: mol_type = other DNA
gacggatcgggagatctcccgatcccctatggtgcactctcagtacaatctgctctgatgccgcatagttaagccagtatctgctccctgcttgtgtgttggaggtcgctgagtagtgcgcgagcaaaatttaagctacaacaaggcaaggcttgaccgacaattgcatgaagaatctgcttagggttaggcgttttgcgctgcttcgcgatgtacgggccagatatacgcgttgacattgattattgactagttattaatagtaatcaattacggggtcattagttcatagcccatatatggagttccgcgttacataacttacggtaaatggcccgcctggctgaccgcccaacgacccccgcccattgacgtcaataatgacgtatgttcccatagtaacgccaatagggactttccattgacgtcaatgggtggagtatttacggtaaactgcccacttggcagtacatcaagtgtatcatatgccaagtacgccccctattgacgtcaatgacggtaaatggcccgcctggcattatgcccagtacatgaccttatgggactttcctacttggcagtacatctacgtattagtcatcgctattaccatggtgatgcggttttggcagtacatcaatgggcgtggatagcggtttgactcacggggatttccaagtctccaccccattgacgtcaatgggagtttgttttggcaccaaaatcaacgggactttccaaaatgtcgtaacaactccgccccattgacgcaaatgggcggtaggcgtgtacggtgggaggtctatataagcagagctctctggctaactagagaacccactgcttactggcttatcgaaattaatacgactcactatagggagacccaagctggatgtttgtgttcctggtgctgctgccactggtgtccagccagtgtgtgaacctgaccaccaggacccaacttcctcctgcctacaccaactccttcaccaggggagtctactaccctgacaaggtgttcaggtcctctgtgctgcacagcacccaggacctgttcctgccattcttcagcaatgtgacctggttccatgccatccatgtgtctggcaccaatggcaccaagaggtttgacaaccctgtgctgccattcaatgatggagtctactttgccagcacagagaagagcaacatcatcaggggctggatttttggcaccaccctggacagcaagacccagtccctgctgattgtgaacaatgccaccaatgtggtgattaaggtgtgtgagttccagttctgtaatgacccattcctgggagtctactaccacaagaacaacaagtcctggatggagtctgagttcagggtctactcctctgccaacaactgtacctttgaatatgtgagccaaccattcctgatggacttggagggcaagcagggcaacttcaagaacctgagggagtttgtgttcaagaacattgatggctacttcaagatttacagcaaacacacaccaatcaacctggtgagggacctgccacagggcttctctgccttggaaccactggtggacctgccaattggcatcaacatcaccaggttccagaccctgctggctctgcacaggtcctacctgacacctggagactcctcctctggctggacagcaggagcagcagcctactatgtgggctacctccaaccaaggaccttcctgctgaaatacaatgagaatggcaccatcacagatgctgtggactgtgccctggacccactgtctgagaccaagtgtaccctgaaatccttcacagtggagaagggcatctaccagaccagcaacttcagggtccaaccaacagagagcattgtgaggtttccaaacatcaccaacctgtgtccatttggagaggtgttcaatgccaccaggtttgcctctgtctatgcctggaacaggaagaggattagcaactgtgtggctgactactctgtgctctacaactctgcctccttcagcaccttcaagtgttatggagtgagcccaaccaaactgaatgacctgtgtttcaccaatgtctatgctgactcctttgtgattaggggagatgaggtgagacagattgcccctggacaaacaggcaagattgctgactacaactacaaactgcctgatgacttcacaggctgtgtgattgcctggaacagcgccaacctggacagcaaggtgggaggcaacgccaactacctctacagactgttcaggaagagcaacctgaaaccatttgagagggacatcagcacagagatttaccaggctggcagcacaccatgtaatggagtggagggcttcaactgttactttccactccaatcctatggcttcgccccagctgccggagtgggctaccaaccatacagggtggtggtgctgtcctttgaactgctccatgcccctgccacagtgtgtggaccaaagaagagcaccaacctggtgaagaacaagtgtgtgaacttcaacttcaatggactgacaggcacaggagtgctgacagagagcaacaagaagttcctgccattccaacagtttggcagggacattgctgacaccacagatgctgtgagggacccacagaccttggagattctggacatcacaccatgttcctttggaggagtgtctgtgattacacctggcaccaacaccagcaaccaggtggctgtgctctaccaggatgtgaactgtactgaggtgcctgtggctatccatgctgaccaacttacaccaacctggagggtctacagcacaggcagcaatgtgttccagaccagggctggctgtctgattggagcagagcatgtgaacaactcctatgagtgtgacatcccaattggagcaggcatctgtgcctcctaccagacccagaccaacagcccaaggagggcaaggtctgtggcaagccagagcatcattgcctacacaatgagtctgggagcagagaactctgtggcttacagcaacaacagcattgccatcccaaccaacttcaccatctctgtgaccacagagattctgcctgtgagtatgaccaagacctctgtggactgtacaatgtatatctgtggagacagcacagagtgtagcaacctgctgctccaatatggctccttctgtacccaacttaacagggctctgacaggcattgctgtggaacaggacaagaacacccaggaggtgtttgcccaggtgaagcagatttacaagacacctccaatcaaggactttggaggcttcaacttcagccagattctgcctgacccaagcaagccaagcaagaggtccttcattgaggacctgctgttcaacaaggtgaccctggctgatgctggcttcatcaagcaatatggagactgtctgggagacattgctgccagggacctgatttgtgcccagaagttcaatggactgacagtgctgcctccactgctgacagatgagatgattgcccaatacacctctgccctgctggctggcaccatcacctctggctggacctttggagcaggagcagccctccaaatcccatttgctatgcagatggcttacaggttcaatggcattggagtgacccagaatgtgctctatgagaaccagaaactgattgccaaccagttcaactctgccattggcaagattcaggactccctgtccagcacagcctctgccctgggcaaactccaagatgtggtgaaccagaatgcccaggctctgaacaccctggtgaagcaactttccagcaactttggagccatctcctctgtgctgaatgacatcctgagcagactggacaaggtggaggctgaggtccagattgacagactgattacaggcagactccaatccctccaaacctatgtgacccaacaacttatcagggctgctgagattagggcatctgccaacctggctgccaccaagatgagtgagtgtgtgctgggacaaagcaagagggtggacttctgtggcaagggctaccacctgatgagttttccacagtctgcccctcatggagtggtgttcctgcatgtgacctatgtgcctgcccaggagaagaacttcaccacagcccctgccatctgccatgatggcaaggctcactttccaagggagggagtgtttgtgagcaatggcacccactggtttgtgacccagaggaacttctatgaaccacagattatcaccacagacaacacctttgtgtctggcaactgtgatgtggtgattggcattgtgaacaacacagtctatgacccactccaacctgaactggactccttcaaggaggaactggacaaatacttcaagaaccacaccagccctgatgtggacctgggagacatctctggcatcaatgcctctgtggtgaacatccagaaggagattgacagactgaatgaggtggctaagaacctgaatgagtccctgattgacctccaagaactgggcaaatatgaacaatacatcaagtggccatggtacatctggctgggcttcattgctggactgattgccattgtgatggtgaccataatgctgtgttgtatgacctcctgttgttcctgtctgaaaggctgttgttcctgtggctcctgttgtaagtttgatgaggatgactctgaacctgtgctgaaaggagtgaaactgcactacacctgagtttaaacccgctgatcagcctcgactgtgccttctagttgccagccatctgttgtttgcccctcccccgtgccttccttgaccctggaaggtgccactcccactgtcctttcctaataaaatgaggaaattgcatcgcattgtctgagtaggtgtcattctattctggggggtggggtggggcaggacagcaagggggaggattgggaagacaatagcaggcatgctggggatgcggtgggctctatggcttctgaggcggaaagaaccagctggggctctagggggtatccccacgcgccctgtagcggcgcattaagcgcggcgggtgtggtggttacgcgcagcgtgaccgctacacttgccagcgccctagcgcccgctcctttcgctttcttcccttcctttctcgccacgttcgccggctttccccgtcaagctctaaatcgggggctccctttagggttccgatttagtgctttacggcacctcgaccccaaaaaacttgattagggtgatggttcacgtagtgggccatcgccctgatagacggtttttcgccctttgacgttggagtccacgttctttaatagtggactcttgttccaaactggaacaacactcaaccctatctcggtctattcttttgatttataagggattttgccgatttcggcctattggttaaaaaatgagctgatttaacaaaaatttaacgcgaattaattctgtggaatgtgtgtcagttagggtgtggaaagtccccaggctccccagcaggcagaagtatgcaaagcatgcatctcaattagtcagcaaccaggtgtggaaagtccccaggctccccagcaggcagaagtatgcaaagcatgcatctcaattagtcagcaaccatagtcccgcccctaactccgcccatcccgcccctaactccgcccagttccgcccattctccgccccatggctgactaattttttttatttatgcagaggccgaggccgcctctgcctctgagctattccagaagtagtgaggaggcttttttggaggcctaggcttttgcaaaaagctcccgggagcttgtatatccattttcggatctgatcaagagacaggatgaggatcgtttcgcatgattgaacaagatggattgcacgcaggttctccggccgcttgggtggagaggctattcggctatgactgggcacaacagacaatcggctgctctgatgccgccgtgttccggctgtcagcgcaggggcgcccggttctttttgtcaagaccgacctgtccggtgccctgaatgaactgcaggacgaggcagcgcggctatcgtggctggccacgacgggcgttccttgcgcagctgtgctcgacgttgtcactgaagcgggaagggactggctgctattgggcgaagtgccggggcaggatctcctgtcatctcaccttgctcctgccgagaaagtatccatcatggctgatgcaatgcggcggctgcatacgcttgatccggctacctgcccattcgaccaccaagcgaaacatcgcatcgagcgagcacgtactcggatggaagccggtcttgtcgatcaggatgatctggacgaagagcatcaggggctcgcgccagccgaactgttcgccaggctcaaggcgcgcatgcccgacggcgaggatctcgtcgtgacccatggcgatgcctgcttgccgaatatcatggtggaaaatggccgcttttctggattcatcgactgtggccggctgggtgtggcggaccgctatcaggacatagcgttggctacccgtgatattgctgaagagcttggcggcgaatgggctgaccgcttcctcgtgctttacggtatcgccgctcccgattcgcagcgcatcgccttctatcgccttcttgacgagttcttctgagcgggactctggggttcgaaatgaccgaccaagcgacgcccaacctgccatcacgagatttcgattccaccgccgccttctatgaaaggttgggcttcggaatcgttttccgggacgccggctggatgatcctccagcgcggggatctcatgctggagttcttcgcccaccccaacttgtttattgcagcttataatggttacaaataaagcaatagcatcacaaatttcacaaataaagcatttttttcactgcattctagttgtggtttgtccaaactcatcaatgtatcttatcatgtctgtataccgtcgacctctagctagagcttggcgtaatcatggtcatagctgtttcctgtgtgaaattgttatccgctcacaattccacacaacatacgagccggaagcataaagtgtaaagcctggggtgcctaatgagtgagctaactcacattaattgcgttgcgctcactgcccgctttccagtcgggaaacctgtcgtgccagctgcattaatgaatcggccaacgcgcggggagaggcggtttgcgtattgggcgctcttccgcttcctcgctcactgactcgctgcgctcggtcgttcggctgcggcgagcggtatcagctcactcaaaggcggtaatacggttatccacagaatcaggggataacgcaggaaagaacatgtgagcaaaaggccagcaaaaggccaggaaccgtaaaaaggccgcgttgctggcgtttttccataggctccgcccccctgacgagcatcacaaaaatcgacgctcaagtcagaggtggcgaaacccgacaggactataaagataccaggcgtttccccctggaagctccctcgtgcgctctcctgttccgaccctgccgcttaccggatacctgtccgcctttctcccttcgggaagcgtggcgctttctcatagctcacgctgtaggtatctcagttcggtgtaggtcgttcgctccaagctgggctgtgtgcacgaaccccccgttcagcccgaccgctgcgccttatccggtaactatcgtcttgagtccaacccggtaagacacgacttatcgccactggcagcagccactggtaacaggattagcagagcgaggtatgtaggcggtgctacagagttcttgaagtggtggcctaactacggctacactagaagaacagtatttggtatctgcgctctgctgaagccagttaccttcggaaaaagagttggtagctcttgatccggcaaacaaaccaccgctggtagcggtttttttgtttgcaagcagcagattacgcgcagaaaaaaaggatctcaagaagatcctttgatcttttctacggggtctgacgctcagtggaacgaaaactcacgttaagggattttggtcatgagattatcaaaaaggatcttcacctagatccttttaaattaaaaatgaagttttaaatcaatctaaagtatatatgagtaaacttggtctgacagttaccaatgcttaatcagtgaggcacctatctcagcgatctgtctatttcgttcatccatagttgcctgactccccgtcgtgtagataactacgatacgggagggcttaccatctggccccagtgctgcaatgataccgcgagacccacgctcaccggctccagatttatcagcaataaaccagccagccggaagggccgagcgcagaagtggtcctgcaactttatccgcctccatccagtctattaattgttgccgggaagctagagtaagtagttcgccagttaatagtttgcgcaacgttgttgccattgctacaggcatcgtggtgtcacgctcgtcgtttggtatggcttcattcagctccggttcccaacgatcaaggcgagttacatgatcccccatgttgtgcaaaaaagcggttagctccttcggtcctccgatcgttgtcagaagtaagttggccgcagtgttatcactcatggttatggcagcactgcataattctcttactgtcatgccatccgtaagatgcttttctgtgactggtgagtactcaaccaagtcattctgagaatagtgtatgcggcgaccgagttgctcttgcccggcgtcaatacgggataataccgcgccacatagcagaactttaaaagtgctcatcattggaaaacgttcttcggggcgaaaactctcaaggatcttaccgctgttgagatccagttcgatgtaacccactcgtgcacccaactgatcttcagcatcttttactttcaccagcgtttctgggtgagcaaaaacaggaaggcaaaatgccgcaaaaaagggaataagggcgacacggaaatgttgaatactcatactcttcctttttcaatattattgaagcatttatcagggttattgtctcatgagcggatacatatttgaatgtatttagaaaaataaacaaataggggttccgcgcacatttccccgaaaagtgccacctgacgtc

SEQ ID NO: 98 - DNA, 9143 bp, synthetic construct
  misc_feature 1..9143: note = pMD122_pcDNA3_SARS-CoV-2_spike_mut_v2 copy
  source 1..9143: mol_type = other DNA
gacggatcgggagatctcccgatcccctatggtgcactctcagtacaatctgctctgatgccgcatagttaagccagtatctgctccctgcttgtgtgttggaggtcgctgagtagtgcgcgagcaaaatttaagctacaacaaggcaaggcttgaccgacaattgcatgaagaatctgcttagggttaggcgttttgcgctgcttcgcgatgtacgggccagatatacgcgttgacattgattattgactagttattaatagtaatcaattacggggtcattagttcatagcccatatatggagttccgcgttacataacttacggtaaatggcccgcctggctgaccgcccaacgacccccgcccattgacgtcaataatgacgtatgttcccatagtaacgccaatagggactttccattgacgtcaatgggtggagtatttacggtaaactgcccacttggcagtacatcaagtgtatcatatgccaagtacgccccctattgacgtcaatgacggtaaatggcccgcctggcattatgcccagtacatgaccttatgggactttcctacttggcagtacatctacgtattagtcatcgctattaccatggtgatgcggttttggcagtacatcaatgggcgtggatagcggtttgactcacggggatttccaagtctccaccccattgacgtcaatgggagtttgttttggcaccaaaatcaacgggactttccaaaatgtcgtaacaactccgccccattgacgcaaatgggcggtaggcgtgtacggtgggaggtctatataagcagagctctctggctaactagagaacccactgcttactggcttatcgaaattaatacgactcactatagggagacccaagctggatgtttgtgttcctggtgctgctgccactggtgtccagccagtgtgtgaacctgaccaccaggacccaacttcctcctgcctacaccaactccttcaccaggggagtctactaccctgacaaggtgttcaggtcctctgtgctgcacagcacccaggacctgttcctgccattcttcagcaatgtgacctggttccatgccatccatgtgtctggcaccaatggcaccaagaggtttgacaaccctgtgctgccattcaatgatggagtctactttgccagcacagagaagagcaacatcatcaggggctggatttttggcaccaccctggacagcaagacccagtccctgctgattgtgaacaatgccaccaatgtggtgattaaggtgtgtgagttccagttctgtaatgacccattcctgggagtctactaccacaagaacaacaagtcctggatggagtctgagttcagggtctactcctctgccaacaactgtacctttgaatatgtgagccaaccattcctgatggacttggagggcaagcagggcaacttcaagaacctgagggagtttgtgttcaagaacattgatggctacttcaagatttacagcaaacacacaccaatcaacctggtgagggacctgccacagggcttctctgccttggaaccactggtggacctgccaattggcatcaacatcaccaggttccagaccctgctggctctgcacaggtcctacctgacacctggagactcctcctctggctggacagcaggagcagcagcctactatgtgggctacctccaaccaaggaccttcctgctgaaatacaatgagaatggcaccatcacagatgctgtggactgtgccctggacccactgtctgagaccaagtgtaccctgaaatccttcacagtggagaagggcatctaccagaccagcaacttcagggtccaaccaacagagagcattgtgaggtttccaaacatcaccaacctgtgtccatttggagaggtgttcaatgccaccaggtttgcctctgtctatgcctggaacaggaagaggattagcaactgtgtggctgactactctgtgctctacaactctgcctccttcagcaccttcaagtgttatggagtgagcccaaccaaactgaatgacctgtgtttcaccaatgtctatgctgactcctttgtgattaggggagatgaggtgagacagattgcccctggacaaacaggcgccattgctgactacaactacaaactgcctgatgacttcacaggctgtgtgattgcctggaacagcaacaacctggacagcaaggtgggaggcaactacaactacctctacagagccgctaggaagagcaacctgaaaccatttgagagggacatcagcacagagattgcccaggctggcagcacaccatgtaatggagtggagggcttcaactgttactttccactcgcctcctatggcttccaaccaaccaatggagtgggctaccaaccatacagggtggtggtgctgtcctttgaactgctccatgcccctgccacagtgtgtggaccaaagaagagcaccaacctggtgaagaacaagtgtgtgaacttcaacgccaatggactgacaggcacaggagtgctgacagagagcaacaagaagttcctgccattccaacagtttggcagggacattgctgacaccacagatgctgtgagggacccacagaccttggagattctggacatcacaccatgttcctttggaggagtgtctgtgattacacctggcaccaacaccagcaaccaggtggctgtgctctaccaggatgtgaactgtactgaggtgcctgtggctatccatgctgaccaacttacaccaacctggagggtctacagcacaggcagcaatgtgttccagaccagggctggctgtctgattggagcagagcatgtgaacaactcctatgagtgtgacatcccaattggagcaggcatctgtgcctcctaccagacccagaccaacagcccaaggagggcaaggtctgtggcaagccagagcatcattgcctacacaatgagtctgggagcagagaactctgtggcttacagcaacaacagcattgccatcccaaccaacttcaccatctctgtgaccacagagattctgcctgtgagtatgaccaagacctctgtggactgtacaatgtatatctgtggagacagcacagagtgtagcaacctgctgctccaatatggctccttctgtacccaacttaacagggctctgacaggcattgctgtggaacaggacaagaacacccaggaggtgtttgcccaggtgaagcagatttacaagacacctccaatcaaggactttggaggcttcaacttcagccagattctgcctgacccaagcaagccaagcaagaggtccttcattgaggacctgctgttcaacaaggtgaccctggctgatgctggcttcatcaagcaatatggagactgtctgggagacattgctgccagggacctgatttgtgcccagaagttcaatggactgacagtgctgcctccactgctgacagatgagatgattgcccaatacacctctgccctgctggctggcaccatcacctctggctggacctttggagcaggagcagccctccaaatcccatttgctatgcagatggcttacaggttcaatggcattggagtgacccagaatgtgctctatgagaaccagaaactgattgccaaccagttcaactctgccattggcaagattcaggactccctgtccagcacagcctctgccctgggcaaactccaagatgtggtgaaccagaatgcccaggctctgaacaccctggtgaagcaactttccagcaactttggagccatctcctctgtgctgaatgacatcctgagcagactggacaaggtggaggctgaggtccagattgacagactgattacaggcagactccaatccctccaaacctatgtgacccaacaacttatcagggctgctgagattagggcatctgccaacctggctgccaccaagatgagtgagtgtgtgctgggacaaagcaagagggtggacttctgtggcaagggctaccacctgatgagttttccacagtctgcccctcatggagtggtgttcctgcatgtgacctatgtgcctgcccaggagaagaacttcaccacagcccctgccatctgccatgatggcaaggctcactttccaagggagggagtgtttgtgagcaatggcacccactggtttgtgacccagaggaacttctatgaaccacagattatcaccacagacaacacctttgtgtctggcaactgtgatgtggtgattggcattgtgaacaacacagtctatgacccactccaacctgaactggactccttcaaggaggaactggacaaatacttcaagaaccacaccagccctgatgtggacctgggagacatctctggcatcaatgcctctgtggtgaacatccagaaggagattgacagactgaatgaggtggctaagaacctgaatgagtccctgattgacctccaagaactgggcaaatatgaacaatacatcaagtggccatggtacatctggctgggcttcattgctggactgattgccattgtgatggtgaccataatgctgtgttgtatgacctcctgttgttcctgtctgaaaggctgttgttcctgtggctcctgttgtaagtttgatgaggatgactctgaacctgtgctgaaaggagtgaaactgcactacacctgagtttaaacccgctgatcagcctcgactgtgccttctagttgccagccatctgttgtttgcccctcccccgtgccttccttgaccctggaaggtgccactcccactgtcctttcctaataaaatgaggaaattgcatcgcattgtctgagtaggtgtcattctattctggggggtggggtggggcaggacagcaagggggaggattgggaagacaatagcaggcatgctggggatgcggtgggctctatggcttctgaggcggaaagaaccagctggggctctagggggtatccccacgcgccctgtagcggcgcattaagcgcggcgggtgtggtggttacgcgcagcgtgaccgctacacttgccagcgccctagcgcccgctcctttcgctttcttcccttcctttctcgccacgttcgccggctttccccgtcaagctctaaatcgggggctccctttagggttccgatttagtgctttacggcacctcgaccccaaaaaacttgattagggtgatggttcacgtagtgggccatcgccctgatagacggtttttcgccctttgacgttggagtccacgttctttaatagtggactcttgttccaaactggaacaacactcaaccctatctcggtctattcttttgatttataagggattttgccgatttcggcctattggttaaaaaatgagctgatttaacaaaaatttaacgcgaattaattctgtggaatgtgtgtcagttagggtgtggaaagtccccaggctccccagcaggcagaagtatgcaaagcatgcatctcaattagtcagcaaccaggtgtggaaagtccccaggctccccagcaggcagaagtatgcaaagcatgcatctcaattagtcagcaaccatagtcccgcccctaactccgcccatcccgcccctaactccgcccagttccgcccattctccgccccatggctgactaattttttttatttatgcagaggccgaggccgcctctgcctctgagctattccagaagtagtgaggaggcttttttggaggcctaggcttttgcaaaaagctcccgggagcttgtatatccattttcggatctgatcaagagacaggatgaggatcgtttcgcatgattgaacaagatggattgcacgcaggttctccggccgcttgggtggagaggctattcggctatgactgggcacaacagacaatcggctgctctgatgccgccgtgttccggctgtcagcgcaggggcgcccggttctttttgtcaagaccgacctgtccggtgccctgaatgaactgcaggacgaggcagcgcggctatcgtggctggccacgacgggcgttccttgcgcagctgtgctcgacgttgtcactgaagcgggaagggactggctgctattgggcgaagtgccggggcaggatctcctgtcatctcaccttgctcctgccgagaaagtatccatcatggctgatgcaatgcggcggctgcatacgcttgatccggctacctgcccattcgaccaccaagcgaaacatcgcatcgagcgagcacgtactcggatggaagccggtcttgtcgatcaggatgatctggacgaagagcatcaggggctcgcgccagccgaactgttcgccaggctcaaggcgcgcatgcccgacggcgaggatctcgtcgtgacccatggcgatgcctgcttgccgaatatcatggtggaaaatggccgcttttctggattcatcgactgtggccggctgggtgtggcggaccgctatcaggacatagcgttggctacccgtgatattgctgaagagcttggcggcgaatgggctgaccgcttcctcgtgctttacggtatcgccgctcccgattcgcagcgcatcgccttctatcgccttcttgacgagttcttctgagcgggactctggggttcgaaatgaccgaccaagcgacgcccaacctgccatcacgagatttcgattccaccgccgccttctatgaaaggttgggcttcggaatcgttttccgggacgccggctggatgatcctccagcgcggggatctcatgctggagttcttcgcccaccccaacttgtttattgcagcttataatggttacaaataaagcaatagcatcacaaatttcacaaataaagcatttttttcactgcattctagttgtggtttgtccaaactcatcaatgtatcttatcatgtctgtataccgtcgacctctagctagagcttggcgtaatcatggtcatagctgtttcctgtgtgaaattgttatccgctcacaattccacacaacatacgagccggaagcataaagtgtaaagcctggggtgcctaatgagtgagctaactcacattaattgcgttgcgctcactgcccgctttccagtcgggaaacctgtcgtgccagctgcattaatgaatcggccaacgcgcggggagaggcggtttgcgtattgggcgctcttccgcttcctcgctcactgactcgctgcgctcggtcgttcggctgcggcgagcggtatcagctcactcaaaggcggtaatacggttatccacagaatcaggggataacgcaggaaagaacatgtgagcaaaaggccagcaaaaggccaggaaccgtaaaaaggccgcgttgctggcgtttttccataggctccgcccccctgacgagcatcacaaaaatcgacgctcaagtcagaggtggcgaaacccgacaggactataaagataccaggcgtttccccctggaagctccctcgtgcgctctcctgttccgaccctgccgcttaccggatacctgtccgcctttctcccttcgggaagcgtggcgctttctcatagctcacgctgtaggtatctcagttcggtgtaggtcgttcgctccaagctgggctgtgtgcacgaaccccccgttcagcccgaccgctgcgccttatccggtaactatcgtcttgagtccaacccggtaagacacgacttatcgccactggcagcagccactggtaacaggattagcagagcgaggtatgtaggcggtgctacagagttcttgaagtggtggcctaactacggctacactagaagaacagtatttggtatctgcgctctgctgaagccagttaccttcggaaaaagagttggtagctcttgatccggcaaacaaaccaccgctggtagcggtttttttgtttgcaagcagcagattacgcgcagaaaaaaaggatctcaagaagatcctttgatcttttctacggggtctgacgctcagtggaacgaaaactcacgttaagggattttggtcatgagattatcaaaaaggatcttcacctagatccttttaaattaaaaatgaagttttaaatcaatctaaagtatatatgagtaaacttggtctgacagttaccaatgcttaatcagtgaggcacctatctcagcgatctgtctatttcgttcatccatagttgcctgactccccgtcgtgtagataactacgatacgggagggcttaccatctggccccagtgctgcaatgataccgcgagacccacgctcaccggctccagatttatcagcaataaaccagccagccggaagggccgagcgcagaagtggtcctgcaactttatccgcctccatccagtctattaattgttgccgggaagctagagtaagtagttcgccagttaatagtttgcgcaacgttgttgccattgctacaggcatcgtggtgtcacgctcgtcgtttggtatggcttcattcagctccggttcccaacgatcaaggcgagttacatgatcccccatgttgtgcaaaaaagcggttagctccttcggtcctccgatcgttgtcagaagtaagttggccgcagtgttatcactcatggttatggcagcactgcataattctcttactgtcatgccatccgtaagatgcttttctgtgactggtgagtactcaaccaagtcattctgagaatagtgtatgcggcgaccgagttgctcttgcccggcgtcaatacgggataataccgcgccacatagcagaactttaaaagtgctcatcattggaaaacgttcttcggggcgaaaactctcaaggatcttaccgctgttgagatccagttcgatgtaacccactcgtgcacccaactgatcttcagcatcttttactttcaccagcgtttctgggtgagcaaaaacaggaaggcaaaatgccgcaaaaaagggaataagggcgacacggaaatgttgaatactcatactcttcctttttcaatattattgaagcatttatcagggttattgtctcatgagcggatacatatttgaatgtatttagaaaaataaacaaataggggttccgcgcacatttccccgaaaagtgccacctgacgtc

SEQ ID NO: 99 - DNA, 9143 bp, synthetic construct; identical to SEQ ID NO: 98
  misc_feature 1..9143: note = pMD122_pcDNA3_SARS-CoV-2_spike_mut_v2
  source 1..9143: mol_type = other DNA

SEQ ID NO: 100 - DNA, 9143 bp, synthetic construct
  misc_feature 1..9143: note = pMD123_pcDNA3_SARS-CoV-2_spike_mut_v3
  source 1..9143: mol_type = other DNA
gacggatcgggagatctcccgatcccctatggtgcactctcagtacaatctgctctgatgccgcatagttaagccagtatctgctccctgcttgtgtgttggaggtcgctgagtagtgcgcgagcaaaatttaagctacaacaaggcaaggcttgaccgacaattgcatgaagaatctgcttagggttaggcgttttgcgctgcttcgcgatgtacgggccagatatacgcgttgacattgattattgactagttattaatagtaatcaattacggggtcattagttcatagcccatatatggagttccgcgttacataacttacggtaaatggcccgcctggctgaccgcccaacgacccccgcccattgacgtcaataatgacgtatgttcccatagtaacgccaatagggactttccattgacgtcaatgggtggagtatttacggtaaactgcccacttggcagtacatcaagtgtatcatatgccaagtacgccccctattgacgtcaatgacggtaaatggcccgcctggcattatgcccagtacatgaccttatgggactttcctacttggcagtacatctacgtattagtcatcgctattaccatggtgatgcggttttggcagtacatcaatgggcgtggatagcggtttgactcacggggatttccaagtctccaccccattgacgtcaatgggagtttgttttggcaccaaaatcaacgggactttccaaaatgtcgtaacaactccgccccattgacgcaaatgggcggtaggcgtgtacggtgggaggtctatataagcagagctctctggctaactagagaacccactgcttactggcttatcgaaattaatacgactcactatagggagacccaagctggatgtttgtgttcctggtgctgctgccactggtgtccagccagtgtgtgaacctgaccaccaggacccaacttcctcctgcctacaccaactccttcaccaggggagtctactaccctgacaaggtgttcaggtcctctgtgctgcacagcacccaggacctgttcctgccattcttcagcaatgtgacctggttccatgccatccatgtgtctggcaccaatggcaccaagaggtttgacaaccctgtgctgccattcaatgatggagtctactttgccagcacagagaagagcaacatcatcaggggctggatttttggcaccaccctggacagcaagacccagtccctgctgattgtgaacaatgccaccaatgtggtgattaaggtgtgtgagttccagttctgtaatgacccattcctgggagtctactaccacaagaacaacaagtcctggatggagtctgagttcagggtctactcctctgccaacaactgtacctttgaatatgtgagccaaccattcctgatggacttggagggcaagcagggcaacttcaagaacctgagggagtttgtgttcaagaacattgatggctacttcaagatttacagcaaacacacaccaatcaacctggtgagggacctgccacagggcttctctgccttggaaccactggtggacctgccaattggcatcaacatcaccaggttccagaccctgctggctctgcacaggtcctacctgacacctggagactcctcctctggctggacagcaggagcagcagcctactatgtgggctacctccaaccaaggaccttcctgctgaaatacaatgagaatggcaccatcacagatgctgtggactgtgccctggacccactgtctgagaccaagtgtaccctgaaatccttcacagtggagaagggcatctaccagaccagcaacttcagggtccaaccaacagagagcattgtgaggtttccaaacatcaccaacctgtgtccatttggagaggtgttcaatgccaccaggtttgcctctgtctatgcctggaacaggaagaggattagcaactgtgtggctgactactctgtgctctacaactctgcctccttcagcaccttcaagtgttatggagtgagcccaaccaaactgaatgacctgtgtttcaccaatgtctatgctgactcctttgtgattaggggagatgaggtgagacagattgcccctggacaaacaggcaagattgctgactacaactacaaactgcctgatgacttcacaggctgtgtgattgcctggaacagcaacaacctggacagcaaggtgggaggcaactacaactacctctacagactgttcaggaagagcaacctgaaaccatttgagagggacatcagcacagagatttacgctgctggcagcacaccatgtaatggagtggagggcgccgcttgttactttccactccaatcctatggcttccaaccaaccaatggagtgggctaccaaccatacagggtggtggtgctgtcctttgaactgctccatgcccctgccacagtgtgtggaccaaagaagagcaccaacctggtgaagaacaagtgtgtgaacttcaacttcaatggactgacaggcacaggagtgctgacagagagcaacaagaagttcctgccattccaacagtttggcagggacattgctgacaccacagatgctgtgagggacccacagaccttggagattctggacatcacaccatgttcctttggaggagtgtctgtgattacacctggcaccaacaccagcaaccaggtggctgtgctctaccaggatgtgaactgtactgaggtgcctgtggctatccatgctgaccaacttacaccaacctggagggtctacagcacaggcagcaatgtgttccagaccagggctggctgtctgattggagcagagcatgtgaacaactcctatgagtgtgacatcccaattggagcaggcatctgtgcctcctaccagacccagaccaacagcccaaggagggcaaggtctgtggcaagccagagcatcattgcctacacaatgagtctgggagcagagaactctgtggcttacagcaacaacagcattgccatcccaaccaacttcaccatctctgtgaccacagagattctgcctgtgagtatgaccaagacctctgtggactgtacaatgtatatctgtggagacagcacagagtgtagcaacctgctgctccaatatggctccttctgtacccaacttaacagggctctgacaggcattgctgtggaacaggacaagaacacccaggaggtgtttgcccaggtgaagcagatttacaagacacctccaatcaaggactttggaggcttcaacttcagccagattctgcctgacccaagcaagccaagcaagaggtccttcattgaggacctgctgttcaacaaggtgaccctggctgatgctggcttcatcaagcaatatggagactgtctgggagacattgctgccagggacctgatttgtgcccagaagttcaatggactgacagtgctgcctccactgctgacagatgagatgattgcccaatacacctctgccctgctggctggcaccatcacctctggctggacctttggagcaggagcagccctccaaatcccatttgctatgcagatggcttacaggttcaatggcattggagtgacccagaatgtgctctatgagaaccagaaactgattgccaaccagttcaactctgccattggcaagattcaggactccctgtccagcacagcctctgccctgggcaaactccaagatgtggtgaaccagaatgcccaggctctgaacaccctggtgaagcaactttccagcaactttggagccatctcctctgtgctgaatgacatcctgagcagactggacaaggtggaggctgaggtccagattgacagactgattacaggcagactccaatccctccaaacctatgtgacccaacaacttatcagggctgctgagattagggcatctgccaacctggctgccaccaagatgagtgagtgtgtgctgggacaaagcaagagggtggacttctgtggcaagggctaccacctgatgagttttccacagtctgcccctcatggagtggtgttcctgcatgtgacctatgtgcctgcccaggagaagaacttcaccacagcccctgccatctgccatgatggcaaggctcactttccaagggagggagtgtttgtgagcaatggcacccactggtttgtgacccagaggaacttctatgaaccacagattatcaccacagacaacacctttgtgtctggcaactgtgatgtggtgattggcattgtgaacaacacagtctatgacccactccaacctgaactggactccttcaaggaggaactggacaaatacttcaagaaccacaccagccctgatgtggacctgggagacatctctggcatcaatgcctctgtggtgaacatccagaaggagattgacagactgaatgaggtggctaagaacctgaatgagtccctgattgacctccaagaactgggcaaatatgaacaatacatcaagtggccatggtacatctggctgggcttcattgctggactgattgccattgtgatggtgaccataatgctgtgttgtatgacctcctgttgttcctgtctgaaaggctgttgttcctgtggctcctgttgtaagtttgatgaggatgactctgaacctgtgctgaaaggagtgaaactgcactacacctgagtttaaacccgctgatcagcctcgactgtgccttctagttgccagccatctgttgtttgcccctcccccgtgccttccttgaccctggaaggtgccactcccactgtcctttcctaataaaatgaggaaattgcatcgcattgtctgagtaggtgtcattctattctggggggtggggtggggcaggacagcaagggggaggattgggaagacaatagcaggcatgctggggatgcggtgggctctatggcttctgaggcggaaagaaccagctggggctctagggggtatccccacgcgccctgtagcggcgcattaagcgcggcgggtgtggtggttacgcgcagcgtgaccgctacacttgccagcgccctagcgcccgctcctttcgctttcttcccttcctttctcgccacgttcgccggctttccccgtcaagctctaaatcgggggctccctttagggttccgatttagtgctttacggcacctcgaccccaaaaaacttgattagggtgatggttcacgtagtgggccatcgccctgatagacggtttttcgccctttgacgttggagtccacgttctttaatagtggactcttgttccaaactggaacaacactcaaccctatctcggtctattcttttgatttataagggattttgccgatttcggcctattggttaaaaaatgagctgatttaacaaaaatttaacgcgaattaattctgtggaatgtgtgtcagttagggtgtggaaagtccccaggctccccagcaggcagaagtatgcaaagcatgcatctcaattagtcagcaaccaggtgtggaaagtccccaggctccccagcaggcagaagtatgcaaagcatgcatctcaattagtcagcaaccatagtcccgcccctaactccgcccatcccgcccctaactccgcccagttccgcccattctccgccccatggctgactaattttttttatttatgcagaggccgaggccgcctctgcctctgagctattccagaagtagtgaggaggcttttttggaggcctaggcttttgcaaaaagctcccgggagcttgtatatccattttcggatctgatcaagagacaggatgaggatcgtttcgcatgattgaacaagatggattgcacgcaggttctccggccgcttgggtggagaggctattcggctatgactgggcacaacagacaatcggctgctctgatgccgccgtgttccggctgtcagcgcaggggcgcccggttctttttgtcaagaccgacctgtccggtgccctgaatgaactgcaggacgaggcagcgcggctatcgtggctggccacgacgggcgttccttgcgcagctgtgctcgacgttgtcactgaagcgggaagggactggctgctattgggcgaagtgccggggcaggatctcctgtcatctcaccttgctcctgccgagaaagtatccatcatggctgatgcaatgcggcggctgcatacgcttgatccggctacctgcccattcgaccaccaagcgaaacatcgcatcgagcgagcacgtactcggatggaagccggtcttgtcgatcaggatgatctggacgaagagcatcaggggctcgcgccagccgaactgttcgccaggctcaaggcgcgcatgcccgacggcgaggatctcgtcgtgacccatggcgatgcctgcttgccgaatatcatggtggaaaatggccgcttttctggattcatcgactgtggccggctgggtgtggcggaccgctatcaggacatagcgttggctacccgtgatattgctgaagagcttggcggcgaatgggctgaccgcttcctcgtgctttacggtatcgccgctcccgattcgcagcgcatcgccttctatcgccttcttgacgagttcttctgagcgggactctggggttcgaaatgaccgaccaagcgacgcccaacctgccatcacgagatttcgattccaccgccgccttctatgaaaggttgggcttcggaatcgttttccgggacgccggctggatgatcctccagcgcggggatctcatgctggagttcttcgcccaccccaacttgtttattgcagcttataatggttacaaataaagcaatagcatcacaaatttcacaaataaagcatttttttcactgcattctagttgtggtttgtccaaactcatcaatgtatcttatcatgtctgtataccgtcgacctctagctagagcttggcgtaatcatggtcatagctgtttcctgtgtgaaattgttatccgctcacaattccacacaacatacgagccggaagcataaagtgtaaagcctggggtgcctaatgagtgagctaactcacattaattgcgttgcgctcactgcccgctttccagtcgggaaacctgtcgtgccagctgcattaatgaatcggccaacgcgcggggagaggcggtttgcgtattgggcgctcttccgcttcctcgctcactgactcgctgcgctcggtcgttcggctgcggcgagcggtatcagctcactcaaaggcggtaatacggttatccacagaatcaggggataacgcaggaaagaacatgtgagcaaaaggccagcaaaaggccaggaaccgtaaaaaggccgcgttgctggcgtttttccataggctccgcccccctgacgagcatcacaaaaatcgacgctcaagtcagaggtggcgaaacccgacaggactataaagataccaggcgtttccccctggaagctccctcgtgcgctctcctgttccgaccctgccgcttaccggatacctgtccgcctttctcccttcgggaagcgtggcgctttctcatagctcacgctgtaggtatctcagttcggtgtaggtcgttcgctccaagctgggctgtgtgcacgaaccccccgttcagcccgaccgctgcgccttatccggtaactatcgtcttgagtccaacccggtaagacacgacttatcgccactggcagcagccactggtaacaggattagcagagcgaggtatgtaggcggtgctacagagttcttgaagtggtggcctaactacggctacactagaagaacagtatttggtatctgcgctctgctgaagccagttaccttcggaaaaagagttggtagctcttgatccggcaaacaaaccaccgctggtagcggtttttttgtttgcaagcagcagattacgcgcagaaaaaaaggatctcaagaagatcctttgatcttttctacggggtctgacgctcagtggaacgaaaactcacgttaagggattttggtcatgagattatcaaaaaggatcttcacctagatccttttaaattaaaaatgaagttttaaatcaatctaaagtatatatgagtaaacttggtctgacagttaccaatgcttaatcagtgaggcacctatctcagcgatctgtctatttcgttcatccatagttgcctgactccccgtcgtgtagataactacgatacgggagggcttaccatctggccccagtgctgcaatgataccgcgagacccacgctcaccggctccagatttatcagcaataaaccagccagccggaagggccgagcgcagaagtggtcctgcaactttatccgcctccatccagtctattaattgttgccgggaagctagagtaagtagttcgccagttaatagtttgcgcaacgttgttgccattgctacaggcatcgtggtgtcacgctcgtcgtttggtatggcttcattcagctccggttcccaacgatcaaggcgagttacatgatcccccatgttgtgcaaaaaagcggttagctccttcggtcctccgatcgttgtcagaagtaagttggccgcagtgttatcactcatggttatggcagcactgcataattctcttactgtcatgccatccgtaagatgcttttctgtgactggtgagtactcaaccaagtcattctgagaatagtgtatgcggcgaccgagttgctcttgcccggcgtcaatacgggataataccgcgccacatagcagaactttaaaagtgctcatcattggaaaacgttcttcggggcgaaaactctcaaggatcttaccgctgttgagatccagttcgatgtaacccactcgtgcacccaactgatcttcagcatcttttactttcaccagcgtttctgggtgagcaaaaacaggaaggcaaaatgccgcaaaaaagggaataagggcgacacggaaatgttgaatactcatactcttcctttttcaatattattgaagcatttatcagggttattgtctcatgagcggatacatatttgaatgtatttagaaaaataaacaaataggggttccgcgcacatttccccgaaaagtgccacctgacgtc

SEQ ID NO: 101 - DNA, 9143 bp, synthetic construct
  misc_feature 1..9143: note = pMD124_pcDNA3_SARS-CoV-2_spike_mut_v4
  source 1..9143: mol_type = other DNA
gacggatcgggagatctcccgatcccctatggtgcactctcagtacaatctgctctgatgccgcatagttaagccagtatctgctccctgcttgtgtgttggaggtcgctgagtagtgcgcgagcaaaatttaagctacaacaaggcaaggcttgaccgacaattgcatgaagaatctgcttagggttaggcgttttgcgctgcttcgcgatgtacgggccagatatacgcgttgacattgattattgactagttattaatagtaatcaattacggggtcattagttcatagcccatatatggagttccgcgttacataacttacggtaaatggcccgcctggctgaccgcccaacgacccccgcccattgacgtcaataatgacgtatgttcccatagtaacgccaatagggactttccattgacgtcaatgggtggagtatttacggtaaactgcccacttggcagtacatcaagtgtatcatatgccaagtacgccccctattgacgtcaatgacggtaaatggcccgcctggcattatgcccagtacatgaccttatgggactttcctacttggcagtacatctacgtattagtcatcgctattaccatggtgatgcggttttggcagtacatcaatgggcgtggatagcggtttgactcacggggatttccaagtctccaccccattgacgtcaatgggagtttgttttggcaccaaaatcaacgggactttccaaaatgtcgtaacaactccgccccattgacgcaaatgggcggtaggcgtgtacggtgggaggtctatataagcagagctctctggctaactagagaacccactgcttactggcttatcgaaattaatacgactcactatagggagacccaagctggatgtttgtgttcctggtgctgctgccactggtgtccagccagtgtgtgaacctgaccaccaggacccaacttcctcctgcctacaccaactccttcaccaggggagtctactaccctgacaaggtgttcaggtcctctgtgctgcacagcacccaggacctgttcctgccattcttcagcaatgtgacctggttccatgccatccatgtgtctggcaccaatggcaccaagaggtttgacaaccctgtgctgccattcaatgatggagtctactttgccagcacagagaagagcaacatcatcaggggctggatttttggcaccaccctggacagcaagacccagtccctgctgattgtgaacaatgccaccaatgtggtgattaaggtgtgtgagttccagttctgtaatgacccattcctgggagtctactaccacaagaacaacaagtcctggatggagtctgagttcagggtctactcctctgccaacaactgtacctttgaatatgtgagccaaccattcctgatggacttggagggcaagcagggcaacttcaagaacctgagggagtttgtgttcaagaacattgatggctacttcaagatttacagcaaacacacaccaatcaacctggtgagggacctgccacagggcttctctgccttggaaccactggtggacctgccaattggcatcaacatcaccaggttccagaccctgctggctctgcacaggtcctacctgacacctggagactcctcctctggctggacagcaggagcagcagcctactatgtgggctacctccaaccaaggaccttcctgctgaaatacaatgagaatggcaccatcacagatgctgtggactgtgccctggacccactgtctgagaccaagtgtaccctgaaatccttcacagtggagaagggcatctaccagaccagcaacttcagggtccaaccaacagagagcattgtgaggtttccaaacatcaccaacctgtgtccatttggagaggtgttcaatgccaccaggtttgcctctgtctatgcctggaacaggaagaggattagcaactgtgtggctgactactctgtgctctacaactctgcctccttcagcaccttcaagtgttatggagtgagcccaaccaaactgaatgacctgtgtttcaccaatgtctatgctgactcctttgtgattaggggagatgaggtgagacagattgcccctggacaaacaggcgccattgctgactacaactacaaactgcctgatgacttcacaggctgtgtgattgcctggaacagcgccaacctggacagcaaggtgggaggcaacgccaactacctctacagagccgctaggaagagcaacctgaaaccatttgagagggacatcagcacagagattgccgctgctggcagcacaccatgtaatggagtggagggcgccgcttgttactttccactcgcctcctatggcttcgccccagctgccggagtgggctaccaaccatacagggtggtggtgctgtcctttgaactgctccatgcccctgccacagtgtgtggaccaaagaagagcaccaacctggtgaagaacaagtgtgtgaacttcaacgccaatggactgacaggcacaggagtgctgacagagagcaacaagaagttcctgccattccaacagtttggcagggacattgctgacaccacagatgctgtgagggacccacagaccttggagattctggacatcacaccatgttcctttggaggagtgtctgtgattacacctggcaccaacaccagcaaccaggtggctgtgctctaccaggatgtgaactgtactgaggtgcctgtggctatccatgctgaccaacttacaccaacctggagggtctacagcacaggcagcaatgtgttccagaccagggctggctgtctgattggagcagagcatgtgaacaactcctatgagtgtgacatcccaattggagcaggcatctgtgcctcctaccagacccagaccaacagcccaaggagggcaaggtctgtggcaagccagagcatcattgcctacacaatgagtctgggagcagagaactctgtggcttacagcaacaacagcattgccatcccaaccaacttcaccatctctgtgaccacagagattctgcctgtgagtatgaccaagacctctgtggactgtacaatgtatatctgtggagacagcacagagtgtagcaacctgctgctccaatatggctccttctgtacccaacttaacagggctctgacaggcattgctgtggaacaggacaagaacacccaggaggtgtttgcccaggtgaagcagatttacaagacacctccaatcaaggactttggaggcttcaacttcagccagattctgcctgacccaagcaagccaagcaagaggtccttcattgaggacctgctgttcaacaaggtgaccctggctgatgctggcttcatcaagcaatatggagactgtctgggagacattgctgccagggacctgatttgtgcccagaagttcaatggactgacagtgctgcctccactgctgacagatgagatgattgcccaatacacctctgccctgctggctggcaccatcacctctggctggacctttggagcaggagcagccctccaaatcccatttgctatgcagatggcttacaggttcaatggcattggagtgacccagaatgtgctctatgagaaccagaaactgattgccaaccagttcaactctgccattggcaagattcaggactccctgtccagcacagcctctgccctgggcaaactccaagatgtggtgaaccagaatgcccaggctctgaacaccctggtgaagcaactttccagcaactttggagccatctcctctgtgctgaatgacatcctgagcagactggacaaggtggaggctgaggtccagattgacagactgattacaggcagactccaatccctccaaacctatgtgacccaacaacttatcagggctgctgagattagggcatctgccaacctggctgccaccaagatgagtgagtgtgtgctgggacaaagcaagagggtggacttctgtggcaagggctaccacctgatgagttttccacagtctgcccctcatggagtggtgttcctgcatgtgacctatgtgcctgcccaggagaagaacttcaccacagcccctgccatctgccatgatggcaaggctcactttccaagggagggagtgtttgtgagcaatggcacccactggtttgtgacccagaggaacttctatgaaccacagattatcaccacagacaacacctttgtgtctggcaactgtgatgtggtgattggcattgtgaacaacacagtctatgacccactccaacctgaactggactccttcaaggaggaactggacaaatacttcaagaaccacaccagccctgatgtggacctgggagacatctctggcatcaatgcctctgtggtgaacatccagaaggagattgacagactgaatgaggtggctaagaacctgaatgagtccctgattgacctccaagaactgggcaaatatgaacaatacatcaagtggccatggtacatctggctgggcttcattgctggactgattgccattgtgatggtgaccataatgctgtgttgtatgacctcctgttgttcctgtctgaaaggctgttgttcctgtggctcctgttgtaagtttgatgaggatgactctgaacctgtgctgaaaggagtgaaactgcactacacctgagtttaaacccgctgatcagcctcgactgtgccttctagttgccagccatctgttgtttgcccctcccccgtgccttccttgaccctggaaggtgccactcccactgtcctttcctaataaaatgaggaaattgcatcgcattgtctgagtaggtgtcattctattctggggggtggggtggggcaggacagcaagggggaggattgggaagacaatagcaggcatgctggggatgcggtgggctctatggcttctgaggcggaaagaaccagctggggctctagggggtatccccacgcgccctgtagcggcgcattaagcgcggcgggtgtggtggttacgcgcagcgtgaccgctacacttgccagcgccctagcgcccgctcctttcgctttcttcccttcctttctcgccacgttcgccggctttccccgtcaagctctaaatcgggggctccctttagggttccgatttagtgctttacggcacctcgaccccaaaaaacttgattagggtgatggttcacgtagtgggccatcgccctgatagacggtttttcgccctttgacgttggagtccacgttctttaatagtggactcttgttccaaactggaacaacactcaaccctatctcggtctattcttttgatttataagggattttgccgatttcggcctattggttaaaaaatgagctgatttaacaaaaatttaacgcgaattaattctgtggaatgtgtgtcagttagggtgtggaaagtccccaggctccccagcaggcagaagtatgcaaagcatgcatctcaattagtcagcaaccaggtgtggaaagtccccaggctccccagcaggcagaagtatgcaaagcatgcatctcaattagtcagcaaccatagtcccgcccctaactccgcccatcccgcccctaactccgcccagttccgcccattctccgccccatggctgactaattttttttatttatgcagaggccgaggccgcctctgcctctgagctattccagaagtagtgaggaggcttttttggaggcctaggcttttgcaaaaagctcccgggagcttgtatatccattttcggatctgatcaagagacaggatgaggatcgtttcgcatgattgaacaagatggattgcacgcaggttctccggccgcttgggtggagaggctattcggctatgactgggcacaacagacaatcggctgctctgatgccgccgtgttccggctgtcagcgcaggggcgcccggttctttttgtcaagaccgacctgtccggtgccctgaatgaactgcaggacgaggcagcgcggctatcgtggctggccacgacgggcgttccttgcgcagctgtgctcgacgttgtcactgaagcgggaagggactggctgctattgggcgaagtgccggggcaggatctcctgtcatctcaccttgctcctgccgagaaagtatccatcatggctgatgcaatgcggcggctgcatacgcttgatccggctacctgcccattcgaccaccaagcgaaacatcgcatcgagcgagcacgtactcggatggaagccggtcttgtcgatcaggatgatctggacgaagagcatcaggggctcgcgccagccgaactgttcgccaggctcaaggcgcgcatgcccgacggcgaggatctcgtcgtgacccatggcgatgcctgcttgccgaatatcatggtggaaaatggccgcttttctggattcatcgactgtggccggctgggtgtggcggaccgctatcaggacatagcgttggctacccgtgatattgctgaagagcttggcggcgaatgggctgaccgcttcctcgtgctttacggtatcgccgctcccgattcgcagcgcatcgccttctatcgccttcttgacgagttcttctgagcgggactctggggttcgaaatgaccgaccaagcgacgcccaacctgccatcacgagatttcgattccaccgccgccttctatgaaaggttgggcttcggaatcgttttccgggacgccggctggatgatcctccagcgcggggatctcatgctggagttcttcgcccaccccaacttgtttattgcagcttataatggttacaaataaagcaatagcatcacaaatttcacaaataaagcatttttttcactgcattctagttgtggtttgtccaaactcatcaatgtatcttatcatgtctgtataccgtcgacctctagctagagcttggcgtaatcatggtcatagctgtttcctgtgtgaaattgttatccgctcacaattccacacaacatacgagccggaagcataaagtgtaaagcctggggtgcctaatgagtgagctaactcacattaattgcgttgcgctcactgcccgctttccagtcgggaaacctgtcgtgccagctgcattaatgaatcggccaacgcgcggggagaggcggtttgcgtattgggcgctcttccgcttcctcgctcactgactcgctgcgctcggtcgttcggctgcggcgagcggtatcagctcactcaaaggcggtaatacggttatccacagaatcaggggataacgcaggaaagaacatgtgagcaaaaggccagcaaaaggccaggaaccgtaaaaaggccgcgttgctggcgtttttccataggctccgcccccctgacgagcatcacaaaaatcgacgctcaagtcagaggtggcgaaacccgacaggactataaagataccaggcgtttccccctggaagctccctcgtgcgctctcctgttccgaccctgccgcttaccggatacctgtccgcctttctcccttcgggaagcgtggcgctttctcatagctcacgctgtaggtatctcagttcggtgtaggtcgttcgctccaagctgggctgtgtgcacgaaccccccgttcagcccgaccgctgcgccttatccggtaactatcgtcttgagtccaacccggtaagacacgacttatcgccactggcagcagccactggtaacaggattagcagagcgaggtatgtaggcggtgctacagagttcttgaagtggtggcctaactacggctacactagaagaacagtatttggtatctgcgctctgctgaagccagttaccttcggaaaaagagttggtagctcttgatccggcaaacaaaccaccgctggtagcggtttttttgtttgcaagcagcagattacgcgcagaaaaaaaggatctcaagaagatcctttgatcttttctacggggtctgacgctcagtggaacgaaaactcacgttaagggattttggtcatgagattatcaaaaaggatcttcacctagatccttttaaattaaaaatgaagttttaaatcaatctaaagtatatatgagtaaacttggtctgacagttaccaatgcttaatcagtgaggcacctatctcagcgatctgtctatttcgttcatccatagttgcctgactccccgtcgtgtagataactacgatacgggagggcttaccatctggccccagtgctgcaatgataccgcgagacccacgctcaccggctccagatttatcagcaataaaccagccagccggaagggccgagcgcagaagtggtcctgcaactttatccgcctccatccagtctattaattgttgccgggaagctagagtaagtagttcgccagttaatagtttgcgcaacgttgttgccattgctacaggcatcgtggtgtcacgctcgtcgtttggtatggcttcattcagctccggttcccaacgatcaaggcgagttacatgatcccccatgttgtgcaaaaaagcggttagctccttcggtcctccgatcgttgtcagaagtaagttggccgcagtgttatcactcatggttatggcagcactgcataattctcttactgtcatgccatccgtaagatgcttttctgtgactggtgagtactcaaccaagtcattctgagaatagtgtatgcggcgaccgagttgctcttgcccggcgtcaatacgggataataccgcgccacatagcagaactttaaaagtgctcatcattggaaaacgttcttcggggcgaaaactctcaaggatcttaccgctgttgagatccagttcgatgtaacccactcgtgcacccaactgatcttcagcatcttttactttcaccagcgtttctgggtgagcaaaaacaggaaggcaaaatgccgcaaaaaagggaataagggcgacacggaaatgttgaatactcatactcttcctttttcaatattattgaagcatttatcagggttattgtctcatgagcggatacatatttgaatgtatttagaaaaataaacaaataggggttccgcgcacatttccccgaaaagtgccacctgacgtc

SEQ ID NO: 102 - DNA, 10034 bp, synthetic construct
  misc_feature 1..10034: note = pMD125-pcDNA3.1-SARS2-GGSG-Myc-T2A-BFP-3xFLAG
  source 1..10034: mol_type = other DNA
gacggatcgggagatctcccgatcccctatggtgcactctcagtacaatctgctctgatgccgcatagttaagccagtatctgctccctgcttgtgtgttggaggtcgctgagtagtgcgcgagcaaaatttaagctacaacaaggcaaggcttgaccgacaattgcatgaagaatctgcttagggttaggcgttttgcgctgcttcgcgatgtacgggccagatatacgcgttgacattgattattgactagttattaatagtaatcaattacggggtcattagttcatagcccatatatggagttccgcgttacataacttacggtaaatggcccgcctggctgaccgcccaacgacccccgcccattgacgtcaataatgacgtatgttcccatagtaacgccaatagggactttccattgacgtcaatgggtggagtatttacggtaaactgcccacttggcagtacatcaagtgtatcatatgccaagtacgccccctattgacgtcaatgacggtaaatggcccgcctggcattatgcccagtacatgaccttatgggactttcctacttggcagtacatctacgtattagtcatcgctattaccatggtgatgcggttttggcagtacatcaatgggcgtggatagcggtttgactcacggggatttccaagtctccaccccattgacgtcaatgggagtttgttttggcaccaaaatcaacgggactttccaaaatgtcgtaacaactccgccccattgacgcaaatgggcggtaggcgtgtacggtgggaggtctatataagcagagctctctggctaactagagaacccactgcttactggcttatcgaaattaatacgactcactatagggagacccaagctggatgtttgtgttcctggtgctgctgccactggtgtccagccagtgtgtgaacctgaccaccaggacccaacttcctcctgcctacaccaactccttcaccaggggagtctactaccctgacaaggtgttcaggtcctctgtgctgcacagcacccaggacctgttcctgccattcttcagcaatgtgacctggttccatgccatccatgtgtctggcaccaatggcaccaagaggtttgacaaccctgtgctgccattcaatgatggagtctactttgccagcacagagaagagcaacatcatcaggggctggatttttggcaccaccctggacagcaagacccagtccctgctgattgtgaacaatgccaccaatgtggtgattaaggtgtgtgagttccagttctgtaatgacccattcctgggagtctactaccacaagaacaacaagtcctggatggagtctgagttcagggtctactcctctgccaacaactgtacctttgaatatgtgagccaaccattcctgatggacttggagggcaagcagggcaacttcaagaacctgagggagtttgtgttcaagaacattgatggctacttcaagatttacagcaaacacacaccaatcaacctggtgagggacctgccacagggcttctctgccttggaaccactggtggacctgccaattggcatcaacatcaccaggttccagaccctgctggctctgcacaggtcctacctgacacctggagactcctcctctggctggacagcaggagcagcagcctactatgtgggctacctccaaccaaggaccttcctgctgaaatacaatgagaatggcaccatcacagatgctgtggactgtgccctggacccactgtctgagaccaagtgtaccctgaaatccttcacagtggagaagggcatctaccagaccagcaacttcagggtccaaccaacagagagcattgtgaggtttccaaacatcaccaacctgtgtccatttggagaggtgttcaatgccaccaggtttgcctctgtctatgcctggaacaggaagaggattagcaactgtgtggctgactactctgtgctctacaactctgcctccttcagcaccttcaagtgttatggagtgagcccaaccaaactgaatgacctgtgtttcaccaatgtctatgctgactcctttgtgattaggggagatgaggtgagacagattgcccctggacaaacaggcaagattgctgactacaactacaaactgcctgatgacttcacaggctgtgtgattgcctggaacagcaacaacctggacagcaaggtgggaggcaactacaactacctctacagactgttcaggaagagcaacctgaaaccatttgagagggacatcagcacagagatttaccaggctggcagcacaccatgtaatggagtggagggcttcaactgttactttccactccaatcctatggcttccaaccaaccaatggagtgggctaccaaccatacagggtggtggtgctgtcctttgaactgctccatgcccctgccacagtgtgtggaccaaagaagagcaccaacctggtgaagaacaagtgtgtgaacttcaacttcaatggactgacaggcacaggagtgctgacagagagcaacaagaagttcctgccattccaacagtttggcagggacattgctgacaccacagatgctgtgagggacccacagaccttggagattctggacatcacaccatgttcctttggaggagtgtctgtgattacacctggcaccaacaccagcaaccaggtggctgtgctctaccaggatgtgaactgtactgaggtgcctgtggctatccatgctgaccaacttacaccaacctggagggtctacagcacaggcagcaatgtgttccagaccagggctggctgtctgattggagcagagcatgtgaacaactcctatgagtgtgacatcccaattggagcaggcatctgtgcctcctaccagacccagaccaacagcccaaggagggcaaggtctgtggcaagccagagcatcattgcctacacaatgagtctgggagcagagaactctgtggcttacagcaacaacagcattgccatcccaaccaacttcaccatctctgtgaccacagagattctgcctgtgagtatgaccaagacctctgtggactgtacaatgtatatctgtggagacagcacagagtgtagcaacctgctgctccaatatggctccttctgtacccaacttaacagggctctgacaggcattgctgtggaacaggacaagaacacccaggaggtgtttgcccaggtgaagcagatttacaagacacctccaatcaaggactttggaggcttcaacttcagccagattctgcctgacccaagcaagccaagcaagaggtccttcattgaggacctgctgttcaacaaggtgaccctggctgatgctggcttcatcaagcaatatggagactgtctgggagacattgctgccagggacctgatttgtgcccagaagttcaatggactgacagtgctgcctccactgctgacagatgagatgattgcccaatacacctctgccctgctggctggcaccatcacctctggctggacctttggagcaggagcagccctccaaatcccatttgctatgcagatggcttacaggttcaatggcattggagtgacccagaatgtgctctatgagaaccagaaactgattgccaaccagttcaactctgccattggcaagattcaggactccctgtccagcacagcctctgccctgggcaaactccaagatgtggtgaaccagaatgcccaggctctgaacaccctggtgaagcaactttccagcaactttggagccatctcctctgtgctgaatgacatcctgagcagactggacaaggtggaggctgaggtccagattgacagactgattacaggcagactccaatccctccaaacctatgtgacccaacaacttatcagggctgctgagattagggcatctgccaacctggctgccaccaagatgagtgagtgtgtgctgggacaaagcaagagggtggacttctgtggcaagggctaccacctgatgagttttccacagtctgcccctcatggagtggtgttcctgcatgtgacctatgtgcctgcccaggagaagaacttcaccacagcccctgccatctgccatgatggcaaggctcactttccaagggagggagtgtttgtgagcaatggcacccactggtttgtgacccagaggaacttctatgaaccacagattatcaccacagacaacacctttgtgtctggcaactgtgatgtggtgattggcattgtgaacaacacagtctatgacccactccaacctgaactggactccttcaaggaggaactggacaaatacttcaagaaccacaccagccctgatgtggacctgggagacatctctggcatcaatgcctctgtggtgaacatccagaaggagattgacagactgaatgaggtggctaagaacctgaatgagtccctgattgacctccaagaactgggcaaatatgaacaatacatcaagtggccatggtacatctggctgggcttcattgctggactgattgccattgtgatggtgaccataatgctgtgttgtatgacctcctgttgttcctgtctgaaaggctgttgttcctgtggctcctgttgtaagtttgatgaggatgactctgaacctgtgctgaaaggagtgaaactgcactacaccggcggaggcagcggggagcaaaaacttatctctgaagaggacctcggcagtggagagggcagaggaagtctgctaacatgcggtgacgtcgaggagaatcctggcccaatggtgtctaagggcgaagagctgattaaggagaacatgcacatgaagctgtacatggagggcaccgtggacaaccatcacttcaagtgcacatccgagggcgaaggcaagccctacgagggcacccagaccatgagaatcaaggtggtcgagggcggccctctccccttcgccttcgacatcctggctactagcttcctctacggcagcaagaccttcatcaaccacacccagggcatccccgacttcttcaagcagtccttccctgagggcttcacatgggagagagtcaccacatacgaagatgggggcgtgctgaccgctacccaggacaccagcctccaggacggctgcctcatctacaacgtcaagatcagaggggtgaacttcacatccaacggccctgtgatgcagaagaaaacactcggctgggaggccttcaccgagacgctgtaccccgctgacggcggcctggaaggcagaaacgacatggccctgaagctcgtgggcgggagccatctgatcgcaaacgccaagaccacatatagatccaagaaacccgctaagaacctcaagatgcctggcgtctactatgtggactacagactggaaagaatcaaggaggccaacaacgagacctacgtcgagcagcacgaggtggcagtggccagatactgcgacctccctagcaaactggggcacaagcttaatacgcgtgactacaaagaccatgacggtgattataaagatcatgacatcgattacaaggatgacgatgacaagtaagtttaaacccgctgatcagcctcgactgtgccttctagttgccagccatctgttgtttgcccctcccccgtgccttccttgaccctggaaggtgccactcccactgtcctttcctaataaaatgaggaaattgcatcgcattgtctgagtaggtgtcattctattctggggggtggggtggggcaggacagcaagggggaggattgggaagacaatagcaggcatgctggggatgcggtgggctctatggcttctgaggcggaaagaaccagctggggctctagggggtatccccacgcgccctgtagcggcgcattaagcgcggcgggtgtggtggttacgcgcagcgtgaccgctacacttgccagcgccctagcgcccgctcctttcgctttcttcccttcctttctcgccacgttcgccggctttccccgtcaagctctaaatcgggggctccctttagggttccgatttagtgctttacggcacctcgaccccaaaaaacttgattagggtgatggttcacgtagtgggccatcgccctgatagacggtttttcgccctttgacgttggagtccacgttctttaatagtggactcttgttccaaactggaacaacactcaaccctatctcggtctattcttttgatttataagggattttgccgatttcggcctattggttaaaaaatgagctgatttaacaaaaatttaacgcgaattaattctgtggaatgtgtgtcagttagggtgtggaaagtccccaggctccccagcaggcagaagtatgcaaagcatgcatctcaattagtcagcaaccaggtgtggaaagtccccaggctccccagcaggcagaagtatgcaaagcatgcatctcaattagtcagcaaccatagtcccgcccctaactccgcccatcccgcccctaactccgcccagttccgcccattctccgccccatggctgactaattttttttatttatgcagaggccgaggccgcctctgcctctgagctattccagaagtagtgaggaggcttttttggaggcctaggcttttgcaaaaagctcccgggagcttgtatatccattttcggatctgatcaagagacaggatgaggatcgtttcgcatgattgaacaagatggattgcacgcaggttctccggccgcttgggtggagaggctattcggctatgactgggcacaacagacaatcggctgctctgatgccgccgtgttccggctgtcagcgcaggggcgcccggttctttttgtcaagaccgacctgtccggtgccctgaatgaactgcaggacgaggcagcgcggctatcgtggctggccacgacgggcgttccttgcgcagctgtgctcgacgttgtcactgaagcgggaagggactggctgctattgggcgaagtgccggggcaggatctcctgtcatctcaccttgctcctgccgagaaagtatccatcatggctgatgcaatgcggcggctgcatacgcttgatccggctacctgcccattcgaccaccaagcgaaacatcgcatcgagcgagcacgtactcggatggaagccggtcttgtcgatcaggatgatctggacgaagagcatcaggggctcgcgccagccgaactgttcgccaggctcaaggcgcgcatgcccgacggcgaggatctcgtcgtgacccatggcgatgcctgcttgccgaatatcatggtggaaaatggccgcttttctggattcatcgactgtggccggctgggtgtggcggaccgctatcaggacatagcgttggctacccgtgatattgctgaagagcttggcggcgaatgggctgaccgcttcctcgtgctttacggtatcgccgctcccgattcgcagcgcatcgccttctatcgccttcttgacgagttcttctgagcgggactctggggttcgaaatgaccgaccaagcgacgcccaacctgccatcacgagatttcgattccaccgccgccttctatgaaaggttgggcttcggaatcgttttccgggacgccggctggatgatcctccagcgcggggatctcatgctggagttcttcgcccaccccaacttgtttattgcagcttataatggttacaaataaagcaatagcatcacaaatttcacaaataaagcatttttttcactgcattctagttgtggtttgtccaaactcatcaatgtatcttatcatgtctgtataccgtcgacctctagctagagcttggcgtaatcatggtcatagctgtttcctgtgtgaaattgttatccgctcacaattccacacaacatacgagccggaagcataaagtgtaaagcctggggtgcctaatgagtgagctaactcacattaattgcgttgcgctcactgcccgctttccagtcgggaaacctgtcgtgccagctgcattaatgaatcggccaacgcgcggggagaggcggtttgcgtattgggcgctcttccgcttcctcgctcactgactcgctgcgctcggtcgttcggctgcggcgagcggtatcagctcactcaaaggcggtaatacggttatccacagaatcaggggataacgcaggaaagaacatgtgagcaaaaggccagcaaaaggccaggaaccgtaaaaaggccgcgttgctggcgtttttccataggctccgcccccctgacgagcatcacaaaaatcgacgctcaagtcagaggtggcgaaacccgacaggactataaagataccaggcgtttccccctggaagctccctcgtgcgctctcctgttccgaccctgccgcttaccggatacctgtccgcctttctcccttcgggaagcgtggcgctttctcatagctcacgctgtaggtatctcagttcggtgtaggtcgttcgctccaagctgggctgtgtgcacgaaccccccgttcagcccgaccgctgcgccttatccggtaactatcgtcttgagtccaacccggtaagacacgacttatcgccactggcagcagccactggtaacaggattagcagagcgaggtatgtaggcggtgctacagagttcttgaagtggtggcctaactacggctacactagaagaacagtatttggtatctgcgctctgctgaagccagttaccttcggaaaaagagttggtagctcttgatccggcaaacaaaccaccgctggtagcggtttttttgtttgcaagcagcagattacgcgcagaaaaaaaggatctcaagaagatcctttgatcttttctacggggtctgacgctcagtggaacgaaaactcacgttaagggattttggtcatgagattatcaaaaaggatcttcacctagatccttttaaattaaaaatgaagttttaaatcaatctaaagtatatatgagtaaacttggtctgacagttaccaatgcttaatcagtgaggcacctatctcagcgatctgtctatttcgttcatccatagttgcctgactccccgtcgtgtagataactacgatacgggagggcttaccatctggccccagtgctgcaatgataccgcgagacccacgctcaccggctccagatttatcagcaataaaccagccagccggaagggccgagcgcagaagtggtcctgcaactttatccgcctccatccagtctattaattgttgccgggaagctagagtaagtagttcgccagttaatagtttgcgcaacgttgttgccattgctacaggcatcgtggtgtcacgctcgtcgtttggtatggcttcattcagctccggttcccaacgatcaaggcgagttacatgatcccccatgttgtgcaaaaaagcggttagctccttcggtcctccgatcgttgtcagaagtaagttggccgcagtgttatcactcatggttatggcagcactgcataattctcttactgtcatgccatccgtaagatgcttttctgtgactggtgagtactcaaccaagtcattctgagaatagtgtatgcggcgaccgagttgctcttgcccggcgtcaatacgggataataccgcgccacatagcagaactttaaaagtgctcatcattggaaaacgttcttcggggcgaaaactctcaaggatcttaccgctgttgagatccagttcgatgtaacccactcgtgcacccaactgatcttcagcatcttttactttcaccagcgtttctgggtgagcaaaaacaggaaggcaaaatgccgcaaaaaagggaataagggcgacacggaaatgttgaatactcatactcttcctttttcaatattattgaagcatttatcagggttattgtctcatgagcggatacatatttgaatgtatttagaaaaataaacaaataggggttccgcgcacatttccccgaaaagtgccacctgacgtc

SEQ ID NO: 103 - DNA, 9944 bp, synthetic construct
  misc_feature 1..9944: note = pMD126-pcDNA3.1-SARS2-WT-GGSG-Myc-T2A-mScarlet
  source 1..9944: mol_type = other DNA
gacggatcgggagatctcccgatcccctatggtgcactctcagtacaatctgctctgatgccgcatagttaagccagtatctgctccctgcttgtgtgttggaggtcgctgagtagtgcgcgagcaaaatttaagctacaacaaggcaaggcttgaccgacaattgcatgaagaatctgcttagggttaggcgttttgcgctgcttcgcgatgtacgggccagatatacgcgttgacattgattattgactagttattaatagtaatcaattacggggtcattagttcatagcccatatatggagttccgcgttacataacttacggtaaatggcccgcctggctgaccgcccaacgacccccgcccattgacgtcaataatgacgtatgttcccatagtaacgccaatagggactttccattgacgtcaatgggtggagtatttacggtaaactgcccacttggcagtacatcaagtgtatcatatgccaagtacgccccctattgacgtcaatgacggtaaatggcccgcctggcattatgcccagtacatgaccttatgggactttcctacttggcagtacatctacgtattagtcatcgctattaccatggtgatgcggttttggcagtacatcaatgggcgtggatagcggtttgactcacggggatttccaagtctccaccccattgacgtcaatgggagtttgttttggcaccaaaatcaacgggactttccaaaatgtcgtaacaactccgccccattgacgcaaatgggcggtaggcgtgtacggtgggaggtctatataagcagagctctctggctaactagagaacccactgcttactggcttatcgaaattaatacgactcactatagggagacccaagctggatgtttgtgttcctggtgctgctgccactggtgtccagccagtgtgtgaacctgaccaccaggacccaacttcctcctgcctacaccaactccttcaccaggggagtctactaccctgacaaggtgttcaggtcctctgtgctgcacagcacccaggacctgttcctgccattcttcagcaatgtgacctggttccatgccatccatgtgtctggcaccaatggcaccaagaggtttgacaaccctgtgctgccattcaatgatggagtctactttgccagcacagagaagagcaacatcatcaggggctggatttttggcaccaccctggacagcaagacccagtccctgctgattgtgaacaatgccaccaatgtggtgattaaggtgtgtgagttccagttctgtaatgacccattcctgggagtctactaccacaagaacaacaagtcctggatggagtctgagttcagggtctactcctctgccaacaactgtacctttgaatatgtgagccaaccattcctgatggacttggagggcaagcagggcaacttcaagaacctgagggagtttgtgttcaagaacattgatggctacttcaagatttacagcaaacacacaccaatcaacctggtgagggacctgccacagggcttctctgccttggaaccactggtggacctgccaattggcatcaacatcaccaggttccagaccctgctggctctgcacaggtcctacctgacacctggagactcctcctctggctggacagcaggagcagcagcctactatgtgggctacctccaaccaaggaccttcctgctgaaatacaatgagaatggcaccatcacagatgctgtggactgtgccctggacccactgtctgagaccaagtgtaccctgaaatccttcacagtggagaagggcatctaccagaccagcaacttcagggtccaaccaacagagagcattgtgaggtttccaaacatcaccaacctgtgtccatttggagaggtgttcaatgccaccaggtttgcctctgtctatgcctggaacaggaagaggattagcaactgtgtggctgactactctgtgctctacaactctgcctccttcagcaccttcaagtgttatggagtgagcccaaccaaactgaatgacctgtgtttcaccaatgtctatgctgactcctttgtgattaggggagatgaggtgagacagattgcccctggacaaacaggcaagattgctgactacaactacaaactgcctgatgacttcacaggctgtgtgattgcctggaacagcaacaacctggacagcaaggtgggaggcaactacaactacctctacagactgttcaggaagagcaacctgaaaccatttgagagggacatcagcacagagatttaccaggctggcagcacaccatgtaatggagtggagggcttcaactgttactttccactccaatcctatggcttccaaccaaccaatggagtgggctaccaaccatacagggtggtggtgctgtcctttgaactgctccatgcccctgccacagtgtgtggaccaaagaagagcaccaacctggtgaagaacaagtgtgtgaacttcaacttcaatggactgacaggcacaggagtgctgacagagagcaacaagaagttcctgccattccaacagtttggcagggacattgctgacaccacagatgctgtgagggacccacagaccttggagattctggacatcacaccatgttcctttggaggagtgtctgtgattacacctggcaccaacaccagcaaccaggtggctgtgctctaccaggatgtgaactgtactgaggtgcctgtggctatccatgctgaccaacttacaccaacctggagggtctacagcacaggcagcaatgtgttccagaccagggctggctgtctgattggagcagagcatgtgaacaactcctatgagtgtgacatcccaattggagcaggcatctgtgcctcctaccagacccagaccaacagcccaaggagggcaaggtctgtggcaagccagagcatcattgcctacacaatgagtctgggagcagagaactctgtggcttacagcaacaacagcattgccatcccaaccaacttcaccatctctgtgaccacagagattctgcctgtgagtatgaccaagacctctgtggactgtacaatgtatatctgtggagacagcacagagtgtagcaacctgctgctccaatatggctccttctgtacccaacttaacagggctctgacaggcattgctgtggaacaggacaagaacacccaggaggtgtttgcccaggtgaagcagatttacaagacacctccaatcaaggactttggaggcttcaacttcagccagattctgcctgacccaagcaagccaagcaagaggtccttcattgaggacctgctgttcaacaaggtgaccctggctgatgctggcttcatcaagcaatatggagactgtctgggagacattgctgccagggacctgatttgtgcccagaagttcaatggactgacagtgctgcctccactgctgacagatgagatgattgcccaatacacctctgccctgctggctggcaccatcacctctggctggacctttggagcaggagcagccctccaaatcccatttgctatgcagatggcttacaggttcaatggcattggagtgacccagaatgtgctctatgagaaccagaaactgattgccaaccagttcaactctgccattggcaagattcaggactccctgtccagcacagcctctgccctgggcaaactccaagatgtggtgaaccagaatgcccaggctctgaacaccctggtgaagcaactttccagcaactttggagccatctcctctgtgctgaatgacatcctgagcagactggacaaggtggaggctgaggtccagattgacagactgattacaggcagactccaatccctccaaacctatgtgacccaacaacttatcagggctgctgagattagggcatctgccaacctggctgccaccaagatgagtgagtgtgtgctgggacaaagcaagagggtggacttctgtggcaagggctaccacctgatgagttttccacagtctgcccctcatggagtggtgttcctgcatgtgacctatgtgcctgcccaggagaagaacttcaccacagcccctgccatctgccatgatggcaaggctcactttccaagggagggagtgtttgtgagcaatggcacccactggtttgtgacccagaggaacttctatgaaccacagattatcaccacagacaacacctttgtgtctggcaactgtgatgtggtgattggcattgtgaacaacacagtctatgacccactccaacctgaactggactccttcaaggaggaactggacaaatacttcaagaaccacaccagccctgatgtggacctgggagacatctctggcatcaatgcctctgtggtgaacatccagaaggagattgacagactgaatgaggtggctaagaacctgaatgagtccctgattgacctccaagaactgggcaaatatgaacaatacatcaagtggccatggtacatctggctgggcttcattgctggactgattgccattgtgatggtgaccataatgctgtgttgtatgacctcctgttgttcctgtctgaaaggctgttgttcctgtggctcctgttgtaagtttgatgaggatgactctgaacctgtgctgaaaggagtgaaactgcactacaccggcggaggcagcggggagcaaaaacttatctctgaagaggacctcggcagtggagagggcagaggaagtctgctaacatgcggtgacgtcgaggagaatcctggcccaatgagtaaaggagaagctgtgattaaagagttcatgcgcttcaaagttcacatggagggttctatgaacggtcacgagttcgagatcgaaggcgaaggcgagggccgtccgtatgaaggcacccagaccgccaaactgaaagtgactaaaggcggcccgctgcctttttcctgggacatcctgagcccgcaatttatgtacggttctagggcgttcaccaaacacccagcggatatcccggactattataagcagtcttttccggaaggtttcaagtgggaacgcgtaatgaattttgaagatggtggtgccgtgaccgtcactcaggacacctccctggaggatggcaccctgatctataaagttaaactgcgtggtactaattttccacctgatggcccggtgatgcagaaaaagacgatgggttgggaggcgtctaccgaacgcttgtatccggaagatggtgtgctgaaaggcgacattaaaatggccctgcgcctgaaagatggcggccgctatctggctgacttcaaaaccacgtacaaagccaagaaacctgtgcagatgcctggcgcgtacaatgtggaccgcaaactggacatcacctctcataatgaagattatacggtggtagagcaatatgagcgctccgagggtcgtcattctaccggtggcatggatgaactatacaaataagtttaaacccgctgatcagcctcgactgtgccttctagttgccagccatctgttgtttgcccctcccccgtgccttccttgaccctggaaggtgccactcccactgtcctttcctaataaaatgaggaaattgcatcgcattgtctgagtaggtgtcattctattctggggggtggggtggggcaggacagcaagggggaggattgggaagacaatagcaggcatgctggggatgcggtgggctctatggcttctgaggcggaaagaaccagctggggctctagggggtatccccacgcgccctgtagcggcgcattaagcgcggcgggtgtggtggttacgcgcagcgtgaccgctacacttgccagcgccctagcgcccgctcctttcgctttcttcccttcctttctcgccacgttcgccggctttccccgtcaagctctaaatcgggggctccctttagggttccgatttagtgctttacggcacctcgaccccaaaaaacttgattagggtgatggttcacgtagtgggccatcgccctgatagacggtttttcgccctttgacgttggagtccacgttctttaatagtggactcttgttccaaactggaacaacactcaaccctatctcggtctattcttttgatttataagggattttgccgatttcggcctattggttaaaaaatgagctgatttaacaaaaatttaacgcgaattaattctgtggaatgtgtgtcagttagggtgtggaaagtccccaggctccccagcaggcagaagtatgcaaagcatgcatctcaattagtcagcaaccaggtgtggaaagtccccaggctccccagcaggcagaagtatgcaaagcatgcatctcaattagtcagcaaccatagtcccgcccctaactccgcccatcccgcccctaactccgcccagttccgcccattctccgccccatggctgactaattttttttatttatgcagaggccgaggccgcctctgcctctgagctattccagaagtagtgaggaggcttttttggaggcctaggcttttgcaaaaagctcccgggagcttgtatatccattttcggatctgatcaagagacaggatgaggatcgtttcgcatgattgaacaagatggattgcacgcaggttctccggccgcttgggtggagaggctattcggctatgactgggcacaacagacaatcggctgctctgatgccgccgtgttccggctgtcagcgcaggggcgcccggttctttttgtcaagaccgacctgtccggtgccctgaatgaactgcaggacgaggcagcgcggctatcgtggctggccacgacgggcgttccttgcgcagctgtgctcgacgttgtcactgaagcgggaagggactggctgctattgggcgaagtgccggggcaggatctcctgtcatctcaccttgctcctgccgagaaagtatccatcatggctgatgcaatgcggcggctgcatacgcttgatccggctacctgcccattcgaccaccaagcgaaacatcgcatcgagcgagcacgtactcggatggaagccggtcttgtcgatcaggatgatctggacgaagagcatcaggggctcgcgccagccgaactgttcgccaggctcaaggcgcgcatgcccgacggcgaggatctcgtcgtgacccatggcgatgcctgcttgccgaatatcatggtggaaaatggccgcttttctggattcatcgactgtggccggctgggtgtggcggaccgctatcaggacatagcgttggctacccgtgatattgctgaagagcttggcggcgaatgggctgaccgcttcctcgtgctttacggtatcgccgctcccgattcgcagcgcatcgccttctatcgccttcttgacgagttcttctgagcgggactctggggttcgaaatgaccgaccaagcgacgcccaacctgccatcacgagatttcgattccaccgccgccttctatgaaaggttgggcttcggaatcgttttccgggacgccggctggatgatcctccagcgcggggatctcatgctggagttcttcgcccaccccaacttgtttattgcagcttataatggttacaaataaagcaatagcatcacaaatttcacaaataaagcatttttttcactgcattctagttgtggtttgtccaaactcatcaatgtatcttatcatgtctgtataccgtcgacctctagctagagcttggcgtaatcatggtcatagctgtttcctgtgtgaaattgttatccgctcacaattccacacaacatacgagccggaagcataaagtgtaaagcctggggtgcctaatgagtgagctaactcacattaattgcgttgcgctcactgcccgctttccagtcgggaaacctgtcgtgccagctgcattaatgaatcggccaacgcgcggggagaggcggtttgcgtattgggcgctcttccgcttcctcgctcactgactcgctgcgctcggtcgttcggctgcggcgagcggtatcagctcactcaaaggcggtaatacggttatccacagaatcaggggataacgcaggaaagaacatgtgagcaaaaggccagcaaaaggccaggaaccgtaaaaaggccgcgttgctggcgtttttccataggctccgcccccctgacgagcatcacaaaaatcgacgctcaagtcagaggtggcgaaacccgacaggactataaagataccaggcgtttccccctggaagctccctcgtgcgctctcctgttccgaccctgccgcttaccggatacctgtccgcctttctcccttcgggaagcgtggcgctttctcatagctcacgctgtaggtatctcagttcggtgtaggtcgttcgctccaagctgggctgtgtgcacgaaccccccgttcagcccgaccgctgcgccttatccggtaactatcgtcttgagtccaacccggtaagacacgacttatcgccactggcagcagccactggtaacaggattagcagagcgaggtatgtaggcggtgctacagagttcttgaagtggtggcctaactacggctacactagaagaacagtatttggtatctgcgctctgctgaagccagttaccttcggaaaaagagttggtagctcttgatccggcaaacaaaccaccgctggtagcggtttttttgtttgcaagcagcagattacgcgcagaaaaaaaggatctcaagaagatcctttgatcttttctacggggtctgacgctcagtggaacgaaaactcacgttaagggattttggtcatgagattatcaaaaaggatcttcacctagatccttttaaattaaaaatgaagttttaaatcaatctaaagtatatatgagtaaacttggtctgacagttaccaatgcttaatcagtgaggcacctatctcagcgatctgtctatttcgttcatccatagttgcctgactccccgtcgtgtagataactacgatacgggagggcttaccatctggccccagtgctgcaatgataccgcgagacccacgctcaccggctccagatttatcagcaataaaccagccagccggaagggccgagcgcagaagtggtcctgcaactttatccgcctccatccagtctattaattgttgccgggaagctagagtaagtagttcgccagttaatagtttgcgcaacgttgttgccattgctacaggcatcgtggtgtcacgctcgtcgtttggtatggcttcattcagctccggttcccaacgatcaaggcgagttacatgatcccccatgttgtgcaaaaaagcggttagctccttcggtcctccgatcgttgtcagaagtaagttggccgcagtgttatcactcatggttatggcagcactgcataattctcttactgtcatgccatccgtaagatgcttttctgtgactggtgagtactcaaccaagtcattctgagaatagtgtatgcggcgaccgagttgctcttgcccggcgtcaatacgggataataccgcgccacatagcagaactttaaaagtgctcatcattggaaaacgttcttcggggcgaaaactctcaaggatcttaccgctgttgagatccagttcgatgtaacccactcgtgcacccaactgatcttcagcatcttttactttcaccagcgtttctgggtgagcaaaaacaggaaggcaaaatgccgcaaaaaagggaataagggcgacacggaaatgttgaatactcatactcttcctttttcaatattattgaagcatttatcagggttattgtctcatgagcggatacatatttgaatgtatttagaaaaataaacaaataggggttccgcgcacatttccccgaaaagtgccacctgacgtc

SEQ ID NO: 104 - DNA, 9944 bp, synthetic construct
  misc_feature 1..9944: note = pMD127-pcDNA3.1-SARS2-mut-v1-GGSG-Myc-T2A-mScarlet
  source 1..9944: mol_type = other DNA
gacggatcgggagatctcccgatcccctatggtgcactctcagtacaatctgctctgatgccgcatagttaagccagtatctgctccctgcttgtgtgttggaggtcgctgagtagtgcgcgagcaaaatttaagctacaacaaggcaaggcttgaccgacaattgcatgaagaatctgcttagggttaggcgttttgcgctgcttcgcgatgtacgggccagatatacgcgttgacattgattattgactagttattaatagtaatcaattacggggtcattagttcatagcccatatatggagttccgcgttacataacttacggtaaatggcccgcctggctgaccgcccaacgacccccgcccattgacgtcaataatgacgtatgttcccatagtaacgccaatagggactttccattgacgtcaatgggtggagtatttacggtaaactgcccacttggcagtacatcaagtgtatcatatgccaagtacgccccctattgacgtcaatgacggtaaatggcccgcctggcattatgcccagtacatgaccttatgggactttcctacttggcagtacatctacgtattagtcatcgctattaccatggtgatgcggttttggcagtacatcaatgggcgtggatagcggtttgactcacggggatttccaagtctccaccccattgacgtcaatgggagtttgttttggcaccaaaatcaacgggactttccaaaatgtcgtaacaactccgccccattgacgcaaatgggcggtaggcgtgtacggtgggaggtctatataagcagagctctctggctaactagagaacccactgcttactggcttatcgaaattaatacgactcactatagggagacccaagctggatgtttgtgttcctggtgctgctgccactggtgtccagccagtgtgtgaacctgaccaccaggacccaacttcctcctgcctacaccaactccttcaccaggggagtctactaccctgacaaggtgttcaggtcctctgtgctgcacagcacccaggacctgttcctgccattcttcagcaatgtgacctggttccatgccatccatgtgtctggcaccaatggcaccaagaggtttgacaaccctgtgctgccattcaatgatggagtctactttgccagcacagagaagagcaacatcatcaggggctggatttttggcaccaccctggacagcaagacccagtccctgctgattgtgaacaatgccaccaatgtggtgattaaggtgtgtgagttccagttctgtaatgacccattcctgggagtctactaccacaagaacaacaagtcctggatggagtctgagttcagggtctactcctctgccaacaactgtacctttgaatatgtgagccaaccattcctgatggacttggagggcaagcagggcaacttcaagaacctgagggagtttgtgttcaagaacattgatggctacttcaagatttacagcaaacacacaccaatcaacctggtgagggacctgccacagggcttctctgccttggaaccactggtggacctgccaattggcatcaacatcaccaggttccagaccctgctggctctgcacaggtcctacctgacacctggagactcctcctctggctggacagcaggagcagcagcctactatgtgggctacctccaaccaaggaccttcctgctgaaatacaatgagaatggcaccatcacagatgctgtggactgtgccctggacccactgtctgagaccaagtgtaccctgaaatccttcacagtggagaagggcatctaccagaccagcaacttcagggtccaaccaacagagagcattgtgaggtttccaaacatcaccaacctgtgtccatttggagaggtgttcaatgccaccaggtttgcctctgtctatgcctggaacaggaagaggattagcaactgtgtggctgactactctgtgctctacaactctgcctccttcagcaccttcaagtgttatggagtgagcccaaccaaactgaatgacctgtgtttcaccaatgtctatgctgactcctttgtgattaggggagatgaggtgagacagattgcccctggacaaacaggcaagattgctgactacaactacaaactgcctgatgacttcacaggctgtgtgattgcctggaacagcgccaacctggacagcaaggtgggaggcaacgccaactacctctacagactgttcaggaagagcaacctgaaaccatttgagagggacatcagcacagagatttaccaggctggcagcacaccatgtaatggagtggagggcttcaactgttactttccactccaatcctatggcttcgccccagctgccggagtgggctaccaaccatacagggtggtggtgctgtcctttgaactgctccatgcccctgccacagtgtgtggaccaaagaagagcaccaacctggtgaagaacaagtgtgtgaacttcaacttcaatggactgacaggcacaggagtgctgacagagagcaacaagaagttcctgccattccaacagtttggcagggacattgctgacaccacagatgctgtgagggacccacagaccttggagattctggacatcacaccatgttcctttggaggagtgtctgtgattacacctggcaccaacaccagcaaccaggtggctgtgctctaccaggatgtgaactgtactgaggtgcctgtggctatccatgctgaccaacttacaccaacctggagggtctacagcacaggcagcaatgtgttccagaccagggctggctgtctgattggagcagagcatgtgaacaactcctatgagtgtgacatcccaattggagcaggcatctgtgcctcctaccagacccagaccaacagcccaaggagggcaaggtctgtggcaagccagagcatcattgcctacacaatgagtctgggagcagagaactctgtggcttacagcaacaacagcattgccatcccaaccaacttcaccatctctgtgaccacagagattctgcctgtgagtatgaccaagacctctgtggactgtacaatgtatatctgtggagacagcacagagtgtagcaacctgctgctccaatatggctccttctgtacccaacttaacagggctctgacaggcattgctgtggaacaggacaagaacacccaggaggtgtttgcccaggtgaagcagatttacaagacacctccaatcaaggactttggaggcttcaacttcagccagattctgcctgacccaagcaagccaagcaagaggtccttcattgaggacctgctgttcaacaaggtgaccctggctgatgctggcttcatcaagcaatatggagactgtctgggagacattgctgccagggacctgatttgtgcccagaagttcaatggactgacagtgctgcctccactgctgacagatgagatgattgcccaatacacctctgccctgctggctggcaccatcacctctggctggacctttggagcaggagcagccctccaaatcccatttgctatgcagatggcttacaggttcaatggcattggagtgacccagaatgtgctctatgagaaccagaaactgattgccaaccagttcaactctgccattggcaagattcaggactccctgtccagcacagcctctgccctgggcaaactccaagatgtggtgaaccagaatgcccaggctctgaacaccctggtgaagcaactttccagcaactttggagccatctcctctgtgctgaatgacatcctgagcagactggacaaggtggaggctgaggtccagattgacagactgattacaggcagactccaatccctccaaacctatgtgacccaacaacttatcagggctgctgagattagggcatctgccaacctggctgccaccaagatgagtgagtgtgtgctgggacaaagcaagagggtggacttctgtggcaagggctaccacctgatgagttttccacagtctgcccctcatggagtggtgttcctgcatgtgacctatgtgcctgcccaggagaagaacttcaccacagcccctgccatctgccatgatggcaaggctcactttccaagggagggagtgtttgtgagcaatggcacccactggtttgtgacccagaggaacttctatgaaccacagattatcaccacagacaacacctttgtgtctggcaactgtgatgtggtgattggcattgtgaacaacacagtctatgacccactccaacctgaactggactccttcaaggaggaactggacaaatacttcaagaaccacaccagccctgatgtggacctgggagacatctctggcatcaatgcctctgtggtgaacatccagaaggagattgacagactgaatgaggtggctaagaacctgaatgagtccctgattgacctccaagaactgggcaaatatgaacaatacatcaagtggccatggtacatctggctgggcttcattgctggactgattgccattgtgatggtgaccataatgctgtgttgtatgacctcctgttgttcctgtctgaaaggctgttgttcctgtggctcctgttgtaagtttgatgaggatgactctgaacctgtgctgaaaggagtgaaactgcactacaccggcggaggcagcggggagcaaaaacttatctctgaagaggacctcggcagtggagagggcagaggaagtctgctaacatgcggtgacgtcgaggagaatcctggcccaatgagtaaaggagaagctgtgattaaagagttcatgcgcttcaaagttcacatggagggttctatgaacggtcacgagttcgagatcgaaggcgaaggcgagggccgtccgtatgaaggcacccagaccgccaaactgaaagtgactaaaggcggcccgctgcctttttcctgggacatcctgagcccgcaatttatgtacggttctagggcgttcaccaaacacccagcggatatcccggactattataagcagtcttttccggaaggtttcaagtgggaacgcgtaatgaattttgaagatggtggtgccgtgaccgtcactcaggacacctccctggaggatggcaccctgatctataaagttaaactgcgtggtactaattttccacctgatggcccggtgatgcagaaaaagacgatgggttgggaggcgtctaccgaacgcttgtatccggaagatggtgtgctgaaaggcgacattaaaatggccctgcgcctgaaagatggcggccgctatctggctgacttcaaaaccacgtacaaagccaagaaacctgtgcagatgcctggcgcgtacaatgtggaccgcaaactggacatcacctctcataatgaagattatacggtggtagagcaatatgagcgctccgagggtcgtcattctaccggtggcatggatgaactatacaaataagtttaaacccgctgatcagcctcgactgtgccttctagttgccagccatctgttgtttgcccctcccccgtgccttccttgaccctggaaggtgccactcccactgtcctttcctaataaaatgaggaaattgcatcgcattgtctgagtaggtgtcattctattctggggggtggggtggggcaggacagcaagggggaggattgggaagacaatagcaggcatgctggggatgcggtgggctctatggcttctgaggcggaaagaaccagctggggctctagggggtatccccacgcgccctgtagcggcgcattaagcgcggcgggtgtggtggttacgcgcagcgtgaccgctacacttgccagcgccctagcgcccgctcctttcgctttcttcccttcctttctcgccacgttcgccggctttccccgtcaagctctaaatcgggggctccctttagggttccgatttagtgctttacggcacctcgaccccaaaaaacttgattagggtgatggttcacgtagtgggccatcgccctgatagacggtttttcgccctttgacgttggagtccacgttctttaatagtggactcttgttccaaactggaacaacactcaaccctatctcggtctattcttttgatttataagggattttgccgatttcggcctattggttaaaaaatgagctgatttaacaaaaatttaacgcgaattaattctgtggaatgtgtgtcagttagggtgtggaaagtccccaggctccccagcaggcagaagtatgcaaagcatgcatctcaattagtcagcaaccaggtgtggaaagtccccaggctccccagcaggcagaagtatgcaaagcatgcatctcaattagtcagcaaccatagtcccgcccctaactccgcccatcccgcccctaactccgcccagttccgcccattctccgccccatggctgactaattttttttatttatgcagaggccgaggccgcctctgcctctgagctattccagaagtagtgaggaggcttttttggaggcctaggcttttgcaaaaagctcccgggagcttgtatatccattttcggatctgatcaagagacaggatgaggatcgtttcgcatgattgaacaagatggattgcacgcaggttctccggccgcttgggtggagaggctattcggctatgactgggcacaacagacaatcggctgctctgatgccgccgtgttccggctgtcagcgcaggggcgcccggttctttttgtcaagaccgacctgtccggtgccctgaatgaactgcaggacgaggcagcgcggctatcgtggctggccacgacgggcgttccttgcgcagctgtgctcgacgttgtcactgaagcgggaagggactggctgctattgggcgaagtgccggggcaggatctcctgtcatctcaccttgctcctgccgagaaagtatccatcatggctgatgcaatgcggcggctgcatacgcttgatccggctacctgcccattcgaccaccaagcgaaacatcgcatcgagcgagcacgtactcggatggaagccggtcttgtcgatcaggatgatctggacgaagagcatcaggggctcgcgccagccgaactgttcgccaggctcaaggcgcgcatgcccgacggcgaggatctcgtcgtgacccatggcgatgcctgcttgccgaatatcatggtggaaaatggccgcttttctggattcatcgactgtggccggctgggtgtggcggaccgctatcaggacatagcgttggctacccgtgatattgctgaagagcttggcggcgaatgggctgaccgcttcctcgtgctttacggtatcgccgctcccgattcgcagcgcatcgccttctatcgccttcttgacgagttcttctgagcgggactctggggttcgaaatgaccgaccaagcgacgcccaacctgccatcacgagatttcgattccaccgccgccttctatgaaaggttgggcttcggaatcgttttccgggacgccggctggatgatcctccagcgcggggatctcatgctggagttcttcgcccaccccaacttgtttattgcagcttataatggttacaaataaagcaatagcatcacaaatttcacaaataaagcatttttttcactgcattctagttgtggtttgtccaaactcatcaatgtatcttatcatgtctgtataccgtcgacctctagctagagcttggcgtaatcatggtcatagctgtttcctgtgtgaaattgttatccgctcacaattccacacaacatacgagccggaagcataaagtgtaaagcctggggtgcctaatgagtgagctaactcacattaattgcgttgcgctcactgcccgctttccagtcgggaaacctgtcgtgccagctgcattaatgaatcggccaacgcgcggggagaggcggtttgcgtattgggcgctcttccgcttcctcgctcactgactcgctgcgctcggtcgttcggctgcggcgagcggtatcagctcactcaaaggcggtaatacggttatccacagaatcaggggataacgcaggaaagaacatgtgagcaaaaggccagcaaaaggccaggaaccgtaaaaaggccgcgttgctggcgtttttccataggctccgcccccctgacgagcatcacaaaaatcgacgctcaagtcagaggtggcgaaacccgacaggactataaagataccaggcgtttccccctggaagctccctcgtgcgctctcctgttccgaccctgccgcttaccggatacctgtccgcctttctcccttcgggaagcgtggcgctttctcatagctcacgctgtaggtatctcagttcggtgtaggtcgttcgctccaagctgggctgtgtgcacgaaccccccgttcagcccgaccgctgcgccttatccggtaactatcgtcttgagtccaacccggtaagacacgacttatcgccactggcagcagccactggtaacaggattagcagagcgaggtatgtaggcggtgctacagagttcttgaagtggtggcctaactacggctacactagaagaacagtatttggtatctgcgctctgctgaagccagttaccttcggaaaaagagttggtagctcttgatccggcaaacaaaccaccgctggtagcggtttttttgtttgcaagcagcagattacgcgcagaaaaaaaggatctcaagaagatcctttgatcttttctacggggtctgacgctcagtggaacgaaaactcacgttaagggattttggtcatgagattatcaaaaaggatcttcacctagatccttttaaattaaaaatgaagttttaaatcaatctaaagtatatatgagtaaacttggtctgacagttaccaatgcttaatcagtgaggcacctatctcagcgatctgtctatttcgttcatccatagttgcctgactccccgtcgtgtagataactacgatacgggagggcttaccatctggccccagtgctgcaatgataccgcgagacccacgctcaccggctccagatttatcagcaataaaccagccagccggaagggccgagcgcagaagtggtcctgcaactttatccgcctccatccagtctattaattgttgccgggaagctagagtaagtagttcgccagttaatagtttgcgcaacgttgttgccattgctacaggcatcgtggtgtcacgctcgtcgtttggtatggcttcattcagctccggttcccaacgatcaaggcgagttacatgatcccccatgttgtgcaaaaaagcggttagctccttcggtcctccgatcgttgtcagaagtaagttggccgcagtgttatcactcatggttatggcagcactgcataattctcttactgtcatgccatccgtaagatgcttttctgtgactggtgagtactcaaccaagtcattctgagaatagtgtatgcggcgaccgagttgctcttgcccggcgtcaatacgggataataccgcgccacatagcagaactttaaaagtgctcatcattggaaaacgttcttcggggcgaaaactctcaaggatcttaccgctgttgagatccagttcgatgtaacccactcgtgcacccaactgatcttcagcatcttttactttcaccagcgtttctgggtgagcaaaaacaggaaggcaaaatgccgcaaaaaagggaataagggcgacacggaaatgttgaatactcatactcttcctttttcaatattattgaagcatttatcagggttattgtctcatgagcggatacatatttgaatgtatttagaaaaataaacaaataggggttccgcgcacatttccccgaaaagtgccacctgacgtc

SEQ ID NO: 105 - DNA, 9944 bp, synthetic construct
  misc_feature 1..9944: note = pMD128-pcDNA3.1-SARS2-mut-v2-GGSG-Myc-T2A-mScarlet
  source 1..9944: mol_type = other DNA
gacggatcgggagatctcccgatcccctatggtgcactctcagtacaatctgctctgatgccgcatagttaagccagtatctgctccctgcttgtgtgttggaggtcgctgagtagtgcgcgagcaaaatttaagctacaacaaggcaaggcttgaccgacaattgcatgaagaatctgcttagggttaggcgttttgcgctgcttcgcgatgtacgggccagatatacgcgttgacattgattattgactagttattaatagtaatcaattacggggtcattagttcatagcccatatatggagttccgcgttacataacttacggtaaatggcccgcctggctgaccgcccaacgacccccgcccattgacgtcaataatgacgtatgttcccatagtaacgccaatagggactttccattgacgtcaatgggtggagtatttacggtaaactgcccacttggcagtacatcaagtgtatcatatgccaagtacgccccctattgacgtcaatgacggtaaatggcccgcctggcattatgcccagtacatgaccttatgggactttcctacttggcagtacatctacgtattagtcatcgctattaccatggtgatgcggttttggcagtacatcaatgggcgtggatagcggtttgactcacggggatttccaagtctccaccccattgacgtcaatgggagtttgttttggcaccaaaatcaacgggactttccaaaatgtcgtaacaactccgccccattgacgcaaatgggcggtaggcgtgtacggtgggaggtctatataagcagagctctctggctaactagagaacccactgcttactggcttatcgaaattaatacgactcactatagggagacccaagctggatgtttgtgttcctggtgctgctgccactggtgtccagccagtgtgtgaacctgaccaccaggacccaacttcctcctgcctacaccaactccttcaccaggggagtctactaccctgacaaggtgttcaggtcctctgtgctgcacagcacccaggacctgttcctgccattcttcagcaatgtgacctggttccatgccatccatgtgtctggcaccaatggcaccaagaggtttgacaaccctgtgctgccattcaatgatggagtctactttgccagcacagagaagagcaacatcatcaggggctggatttttggcaccaccctggacagcaagacccagtccctgctgattgtgaacaatgccaccaatgtggtgattaaggtgtgtgagttccagttctgtaatgacccattcctgggagtctactaccacaagaacaacaagtcctggatggagtctgagttcagggtctactcctctgccaacaactgtacctttgaatatgtgagccaaccattcctgatggacttggagggcaagcagggcaacttcaagaacctgagggagtttgtgttcaagaacattgatggctacttcaagatttacagcaaacacacaccaatcaacctggtgagggacctgccacagggcttctctgccttggaaccactggtggacctgccaattggcatcaacatcaccaggttccagaccctgctggctctgcacaggtcctacctgacacctggagactcctcctctggctggacagcaggagcagcagcctactatgtgggctacctccaaccaaggaccttcctgctgaaatacaatgagaatggcaccatcacagatgctgtggactgtgccctggacccactgtctgagaccaagtgtaccctgaaatccttcacagtggagaagggcatctaccagaccagcaacttcagggtccaaccaacagagagcattgtgaggtttccaaacatcaccaacctgtgtccatttggagaggtgttcaatgccaccaggtttgcctctgtctatgcctggaacaggaagaggattagcaactgtgtggctgactactctgtgctctacaactctgcctccttcagcaccttcaagtgttatggagtgagcccaaccaaactgaatgacctgtgtttcaccaatgtctatgctgactcctttgtgattaggggagatgaggtgagacagattgcccctggacaaacaggcgccattgctgactacaactacaaactgcctgatgacttcacaggctgtgtgattgcctggaacagcaacaacctggacagcaaggtgggaggcaactacaactacctctacagagccgctaggaagagcaacctgaaaccatttgagagggacatcagcacagagattgcccaggctggcagcacaccatgtaatggagtggagggcttcaactgttactttccactcgcctcctatggcttccaaccaaccaatggagtgggctaccaaccatacagggtggtggtgctgtcctttgaactgctccatgcccctgccacagtgtgtggaccaaagaagagcaccaacctggtgaagaacaagtgtgtgaacttcaacgccaatggactgacaggcacaggagtgctgacagagagcaacaagaagttcctgccattccaacagtttggcagggacattgctgacaccacagatgctgtgagggacccacagaccttggagattctggacatcacaccatgttcctttggaggagtgtctgtgattacacctggcaccaacaccagcaaccaggtggctgtgctctaccaggatgtgaactgtactgaggtgcctgtggctatccatgctgaccaacttacaccaacctggagggtctacagcacaggcagcaatgtgttccagaccagggctggctgtctgattggagcagagcatgtgaacaactcctatgagtgtgacatcccaattggagcaggcatctgtgcctcctaccagacccagaccaacagcccaaggagggcaaggtctgtggcaagccagagcatcattgcctacacaatgagtctgggagcagagaactctgtggcttacagcaacaacagcattgccatcccaaccaacttcaccatctctgtgaccacagagattctgcctgtgagtatgaccaagacctctgtggactgtacaatgtatatctgtggagacagcacagagtgtagcaacctgctgctccaatatggctccttctgtacccaacttaacagggctctgacaggcattgctgtggaacaggacaagaacacccaggaggtgtttgcccaggtgaagcagatttacaagacacctccaatcaaggactttggaggcttcaacttcagccagattctgcctgacccaagcaagccaagcaagaggtccttcattgaggacctgctgttcaacaaggtgaccctggctgatgctggcttcatcaagcaatatggagactgtctgggagacattgctgccagggacctgatttgtgcccagaagttcaatggactgacagtgctgcctccactgctgacagatgagatgattgcccaatacacctctgccctgctggctggcaccatcacctctggctggacctttggagcaggagcagccctccaaatcccatttgctatgcagatggcttacaggttcaatggcattggagtgacccagaatgtgctctatgagaaccagaaactgattgccaaccagttcaactctgccattggcaagattcaggactccctgtccagcacagcctctgccctgggcaaactccaagatgtggtgaaccagaatgcccaggctctgaacaccctggtgaagcaactttccagcaactttggagccatctcctctgtgctgaatgacatcctgagcagactggacaaggtggaggctgaggtccagattgacagactgattacaggcagactccaatccctccaaacctatgtgacccaacaacttatcagggctgctgagattagggcatctgccaacctggctgccaccaagatgagtgagtgtgtgctgggacaaagcaagagggtggacttctgtggcaagggctaccacctgatgagttttccacagtctgcccctcatggagtggtgttcctgcatgtgacctatgtgcctgcccaggagaagaacttcaccacagcccctgccatctgccatgatggcaaggctcactttccaagggagggagtgtttgtgagcaatggcacccactggtttgtgacccagaggaacttctatgaaccacagattatcaccacagacaacacctttgtgtctggcaactgtgatgtggtgattggcattgtgaacaacacagtctatgacccactccaacctgaactggactccttcaaggaggaactggacaaatacttcaagaaccacaccagccctgatgtggacctgggagacatctctggcatcaatgcctctgtggtgaacatccagaaggagattgacagactgaatgaggtggctaagaacctgaatgagtccctgattgacctccaagaactgggcaaatatgaacaatacatcaagtggccatggtacatctggctgggcttcattgctggactgattgccattgtgatggtgaccataatgctgtgttgtatgacctcctgttgttcctgtctgaaaggctgttgttcctgtggctcctgttgtaagtttgatgaggatgactctgaacctgtgctgaaaggagtgaaactgcactacaccggcggaggcagcggggagcaaaaacttatctctgaagaggacctcggcagtggagagggcagaggaagtctgctaacatgcggtgacgtcgaggagaatcctggcccaatgagtaaaggagaagctgtgattaaagagttcatgcgcttcaaagttcacatggagggttctatgaacggtcacgagttcgagatcgaaggcgaaggcgagggccgtccgtatgaaggcacccagaccgccaaactgaaagtgactaaaggcggcccgctgcctttttcctgggacatcctgagcccgcaatttatgtacggttctagggcgttcaccaaacacccagcggatatcccggactattataagcagtcttttccggaaggtttcaagtgggaacgcgtaatgaattttgaagatggtggtgccgtgaccgtcactcaggacacctccctggaggatggcaccctgatctataaagttaaactgcgtggtactaattttccacctgatggcccggtgatgcagaaaaagacgatgggttgggaggcgtctaccgaacgcttgtatccggaagatggtgtgctgaaaggcgacattaaaatggccctgcgcctgaaagatggcggccgctatctggctgacttcaaaaccacgtacaaagccaagaaacctgtgcagatgcctggcgcgtacaatgtggaccgcaaactggacatcacctctcataatgaagattatacggtggtagagcaatatgagcgctccgagggtcgtcattctaccggtggcatggatgaactatacaaataagtttaaacccgctgatcagcctcgactgtgccttctagttgccagccatctgttgtttgcccctcccccgtgccttccttgaccctggaaggtgccactcccactgtcctttcctaataaaatgaggaaattgcatcgcattgtctgagtaggtgtcattctattctggggggtggggtggggcaggacagcaagggggaggattgggaagacaatagcaggcatgctggggatgcggtgggctctatggcttctgaggcggaaagaaccagctggggctctagggggtatccccacgcgccctgtagcggcgcattaagcgcggcgggtgtggtggttacgcgcagcgtgaccgctacacttgccagcgccctagcgcccgctcctttcgctttcttcccttcctttctcgccacgttcgccggctttccccgtcaagctctaaatcgggggctccctttagggttccgatttagtgctttacggcacctcgaccccaaaaaacttgattagggtgatggttcacgtagtgggccatcgccctgatagacggtttttcgccctttgacgttggagtccacgttctttaatagtggactcttgttccaaactggaacaacactcaaccctatctcggtctattcttttgatttataagggattttgccgatttcggcctattggttaaaaaatgagctgatttaacaaaaatttaacgcgaattaattctgtggaatgtgtgtcagttagggtgtggaaagtccccaggctccccagcaggcagaagtatgcaaagcatgcatctcaattagtcagcaaccaggtgtggaaagtccccaggctccccagcaggcagaagtatgcaaagcatgcatctcaattagtcagcaaccatagtcccgcccctaactccgcccatcccgcccctaactccgcccagttccgcccattctccgccccatggctgactaattttttttatttatgcagaggccgaggccgcctctgcctctgagctattccagaagtagtgaggaggcttttttggaggcctaggcttttgcaaaaagctcccgggagcttgtatatccattttcggatctgatcaagagacaggatgaggatcgtttcgcatgattgaacaagatggattgcacgcaggttctccggccgcttgggtggagaggctattcggctatgactgggcacaacagacaatcggctgctctgatgccgccgtgttccggctgtcagcgcaggggcgcccggttctttttgtcaagaccgacctgtccggtgccctgaatgaactgcaggacgaggcagcgcggctatcgtggctggccacgacgggcgttccttgcgcagctgtgctcgacgttgtcactgaagcgggaagggactggctgctattgggcgaagtgccggggcaggatctcctgtcatctcaccttgctcctgccgagaaagtatccatcatggctgatgcaatgcggcggctgcatacgcttgatccggctacctgcccattcgaccaccaagcgaaacatcgcatcgagcgagcacgtactcggatggaagccggtcttgtcgatcaggatgatctggacgaagagcatcaggggctcgcgccagccgaactgttcgccaggctcaaggcgcgcatgcccgacggcgaggatctcgtcgtgacccatggcgatgcctgcttgccgaatatcatggtggaaaatggccgcttttctggattcatcgactgtggccggctgggtgtggcggaccgctatcaggacatagcgttggctacccgtgatattgctgaagagcttggcggcgaatgggctgaccgcttcctcgtgctttacggtatcgccgctcccgattcgcagcgcatcgccttctatcgccttcttgacgagttcttctgagcgggactctggggttcgaaatgaccgaccaagcgacgcccaacctgccatcacgagatttcgattccaccgccgccttctatgaaaggttgggcttcggaatcgttttccgggacgccggctggatgatcctccagcgcggggatctcatgctggagttcttcgcccaccccaacttgtttattgcagcttataatggttacaaataaagcaatagcatcacaaatttcacaaataaagcatttttttcactgcattctagttgtggtttgtccaaactcatcaatgtatcttatcatgtctgtataccgtcgacctctagctagagcttggcgtaatcatggtcatagctgtttcctgtgtgaaattgttatccgctcacaattccacacaacatacgagccggaagcataaagtgtaaagcctggggtgcctaatgagtgagctaactcacattaattgcgttgcgctcactgcccgctttccagtcgggaaacctgtcgtgccagctgcattaatgaatcggccaacgcgcggggagaggcggtttgcgtattgggcgctcttccgcttcctcgctcactgactcgctgcgctcggtcgttcggctgcggcgagcggtatcagctcactcaaaggcggtaatacggttatccacagaatcaggggataacgcaggaaagaacatgtgagcaaaaggccagcaaaaggccaggaaccgtaaaaaggccgcgttgctggcgtttttccataggctccgcccccctgacgagcatcacaaaaatcgacgctcaagtcagaggtggcgaaacccgacaggactataaagataccaggcgtttccccctggaagctccctcgtgcgctctcctgttccgaccctgccgcttaccggatacctgtccgcctttctcccttcgggaagcgtggcgctttctcatagctcacgctgtaggtatctcagttcggtgtaggtcgttcgctccaagctgggctgtgtgcacgaaccccccgttcagcccgaccgctgcgccttatccggtaactatcgtcttgagtccaacccggtaagacacgacttatcgccactggcagcagccactggtaacaggattagcagagcgaggtatgtaggcggtgctacagagttcttgaagtggtggcctaactacggctacactagaagaacagtatttggtatctgcgctctgctgaagccagttaccttcggaaaaagagttggtagctcttgatccggcaaacaaaccaccgctggtagcggtttttttgtttgcaagcagcagattacgcgcagaaaaaaaggatctcaagaagatcctttgatcttttctacggggtctgacgctcagtggaacgaaaactcacgttaagggattttggtcatgagattatcaaaaaggatcttcacctagatccttttaaattaaaaatgaagttttaaatcaatctaaagtatatatgagtaaacttggtctgacagttaccaatgcttaatcagtgaggcacctatctcagcgatctgtctatttcgttcatccatagttgcctgactccccgtcgtgtagataactacgatacgggagggcttaccatctggccccagtgctgcaatgataccgcgagacccacgctcaccggctccagatttatcagcaataaaccagccagccggaagggccgagcgcagaagtggtcctgcaactttatccgcctccatccagtctattaattgttgccgggaagctagagtaagtagttcgccagttaatagtttgcgcaacgttgttgccattgctacaggcatcgtggtgtcacgctcgtcgtttggtatggcttcattcagctccggttcccaacgatcaaggcgagttacatgatcccccatgttgtgcaaaaaagcggttagctccttcggtcctccgatcgttgtcagaagtaagttggccgcagtgttatcactcatggttatggcagcactgcataattctcttactgtcatgccatccgtaagatgcttttctgtgactggtgagtactcaaccaagtcattctgagaatagtgtatgcggcgaccgagttgctcttgcccggcgtcaatacgggataataccgcgccacatagcagaactttaaaagtgctcatcattggaaaacgttcttcggggcgaaaactctcaaggatcttaccgctgttgagatccagttcgatgtaacccactcgtgcacccaactgatcttcagcatcttttactttcaccagcgtttctgggtgagcaaaaacaggaaggcaaaatgccgcaaaaaagggaataagggcgacacggaaatgttgaatactcatactcttcctttttcaatattattgaagcatttatcagggttattgtctcatgagcggatacatatttgaatgtatttagaaaaataaacaaataggggttccgcgcacatttccccgaaaagtgccacctgacgtc

SEQ ID NO: 106 - DNA, 9944 bp, synthetic construct
  misc_feature 1..9944: note = pMD129-pcDNA3.1-SARS2-mut-v3-GGSG-Myc-T2A-mScarlet
  source 1..9944: mol_type = other DNA
gacggatcgggagatctcccgatcccctatggtgcactctcagtacaatctgctctgatgccgcatagttaagccagtatctgctccctgcttgtgtgttggaggtcgctgagtagtgcgcgagcaaaatttaagctacaacaaggcaaggcttgaccgacaattgcatgaagaatctgcttagggttaggcgttttgcgctgcttcgcgatgtacgggccagatatacgcgttgacattgattattgactagttattaatagtaatcaattacggggtcattagttcatagcccatatatggagttccgcgttacataacttacggtaaatggcccgcctggctgaccgcccaacgacccccgcccattgacgtcaataatgacgtatgttcccatagtaacgccaatagggactttccattgacgtcaatgggtggagtatttacggtaaactgcccacttggcagtacatcaagtgtatcatatgccaagtacgccccctattgacgtcaatgacggtaaatggcccgcctggcattatgcccagtacatgaccttatgggactttcctacttggcagtacatctacgtattagtcatcgctattaccatggtgatgcggttttggcagtacatcaatgggcgtggatagcggtttgactcacggggatttccaagtctccaccccattgacgtcaatgggagtttgttttggcaccaaaatcaacgggactttccaaaatgtcgtaacaactccgccccattgacgcaaatgggcggtaggcgtgtacggtgggaggtctatataagcagagctctctggctaactagagaacccactgcttactggcttatcgaaattaatacgactcactatagggagacccaagctggatgtttgtgttcctggtgctgctgccactggtgtccagccagtgtgtgaacctgaccaccaggacccaacttcctcctgcctacaccaactccttcaccaggggagtctactaccctgacaaggtgttcaggtcctctgtgctgcacagcacccaggacctgttcctgccattcttcagcaatgtgacctggttccatgccatccatgtgtctggcaccaatggcaccaagaggtttgacaaccctgtgctgccattcaatgatggagtctactttgccagcacagagaagagcaacatcatcaggggctggatttttggcaccaccctggacagcaagacccagtccctgctgattgtgaacaatgccaccaatgtggtgattaaggtgtgtgagttccagttctgtaatgacccattcctgggagtctactaccacaagaacaacaagtcctggatggagtctgagttcagggtctactcctctgccaacaactgtacctttgaatatgtgagccaaccattcctgatggacttggagggcaagcagggcaacttcaagaacctgagggagtttgtgttcaagaacattgatggctacttcaagatttacagcaaacacacaccaatcaacctggtgagggacctgccacagggcttctctgccttggaaccactggtggacctgccaattggcatcaacatcaccaggttccagaccctgctggctctgcacaggtcctacctgacacctggagactcctcctctggctggacagcaggagcagcagcctactatgtgggctacctccaaccaaggaccttcctgctgaaatacaatgagaatggcaccatcacagatgctgtggactgtgccctggacccactgtctgagaccaagtgtaccctgaaatccttcacagtggagaagggcatctaccagaccagcaacttcagggtccaaccaacagagagcattgtgaggtttccaaacatcaccaacctgtgtccatttggagaggtgttcaatgccaccaggtttgcctctgtctatgcctggaacaggaagaggattagcaactgtgtggctgactactctgtgctctacaactctgcctccttcagcaccttcaagtgttatggagtgagcccaaccaaactgaatgacctgtgtttcaccaatgtctatgctgactcctttgtgattaggggagatgaggtgagacagattgcccctggacaaacaggcaagattgctgactacaactacaaactgcctgatgacttcacaggctgtgtgattgcctggaacagcaacaacctggacagcaaggtgggaggcaactacaactacctctacagactgttcaggaagagcaacctgaaaccatttgagagggacatcagcacagagatttacgctgctggcagcacaccatgtaatggagtggagggcgccgcttgttactttccactccaatcctatggcttccaaccaaccaatggagtgggctaccaaccatacagggtggtggtgctgtcctttgaactgctccatgcccctgccacagtgtgtggaccaaagaagagcaccaacctggtgaagaacaagtgtgtgaacttcaacttcaatggactgacaggcacaggagtgctgacagagagcaacaagaagttcctgccattccaacagtttggcagggacattgctgacaccacagatgctgtgagggacccacagaccttggagattctggacatcacaccatgttcctttggaggagtgtctgtgattacacctggcaccaacaccagcaaccaggtggctgtgctctaccaggatgtgaactgtactgaggtgcctgtggctatccatgctgaccaacttacaccaacctggagggtctacagcacaggcagcaatgtgttccagaccagggctggctgtctgattggagcagagcatgtgaacaactcctatgagtgtgacatcccaattggagcaggcatctgtgcctcctaccagacccagaccaacagcccaaggagggcaaggtctgtggcaagccagagcatcattgcctacacaatgagtctgggagcagagaactctgtggcttacagcaacaacagcattgccatcccaaccaacttcaccatctctgtgaccacagagattctgcctgtgagtatgaccaagacctctgtggactgtacaatgtatatctgtggagacagcacagagtgtagcaacctgctgctccaatatggctccttctgtacccaacttaacagggctctgacaggcattgctgtggaacaggacaagaacacccaggaggtgtttgcccaggtgaagcagatttacaagacacctccaatcaaggactttggaggcttcaacttcagccagattctgcctgacccaagcaagccaagcaagaggtccttcattgaggacctgctgttcaacaaggtgaccctggctgatgctggcttcatcaagcaatatggagactgtctgggagacattgctgccagggacctgatttgtgcccagaagttcaatggactgacagtgctgcctccactgctgacagatgagatgattgcccaatacacctctgccctgctggctggcaccatcacctctggctggacctttggagcaggagcagccctccaaatcccatttgctatgcagatggcttacaggttcaatggcattggagtgacccagaatgtgctctatgagaaccagaaactgattgccaaccagttcaactctgccattggcaagattcaggactccctgtccagcacagcctctgccctgggcaaactccaagatgtggtgaaccagaatgcccaggctctgaacaccctggtgaagcaactttccagcaactttggagccatctcctctgtgctgaatgacatcctgagcagactggacaaggtggaggctgaggtccagattgacagactgattacaggcagactccaatccctccaaacctatgtgacccaacaacttatcagggctgctgagattagggcatctgccaacctggctgccaccaagatgagtgagtgtgtgctgggacaaagcaagagggtggacttctgtggcaagggctaccacctgatgagttttccacagtctgcccctcatggagtggtgttcctgcatgtgacctatgtgcctgcccaggagaagaacttcaccacagcccctgccatctgccatgatggcaaggctcactttccaagggagggagtgtttgtgagcaatggcacccactggtttgtgacccagaggaacttctatgaaccacagattatcaccacagacaacacctttgtgtctggcaactgtgatgtggtgattggcattgtgaacaacacagtctatgacccactccaacctgaactggactccttcaaggaggaactggacaaatacttcaagaaccacaccagccctgatgtggacctgggagacatctctggcatcaatgcctctgtggtgaacatccagaaggagattgacagactgaatgaggtggctaagaacctgaatgagtccctgattgacctccaagaactgggcaaatatgaacaatacatcaagtggccatggtacatctggctgggcttcattgctggactgattgccattgtgatggtgaccataatgctgtgttgtatgacctcctgttgttcctgtctgaaaggctgttgttcctgtggctcctgttgtaagtttgatgaggatgactctgaacctgtgctgaaaggagtgaaactgcactacaccggcggaggcagcggggagcaaaaacttatctctgaagaggacctcggcagtggagagggcagaggaagtctgctaacatgcggtgacgtcgaggagaatcctggcccaatgagtaaaggagaagctgtgattaaagagttcatgcgcttcaaagttcacatggagggttctatgaacggtcacgagttcgagatcgaaggcgaaggcgagggccgtccgtatgaaggcacccagaccgccaaactgaaagtgactaaaggcggcccgctgcctttttcctgggacatcctgagcccgcaatttatgtacggttctagggcgttcaccaaacacccagcggatatcccggactattataagcagtcttttccggaaggtttcaagtgggaacgcgtaatgaattttgaagatggtggtgccgtgaccgtcactcaggacacctccctggaggatggcaccctgatctataaagttaaactgcgtggtactaattttccacctgatggcccggtgatgcagaaaaagacgatgggttgggaggcgtctaccgaacgcttgtatccggaagatggtgtgctgaaaggcgacattaaaatggccctgcgcctgaaagatggcggccgctatctggctgacttcaaaaccacgtacaaagccaagaaacctgtgcagatgcctggcgcgtacaatgtggaccgcaaactggacatcacctctcataatgaagattatacggtggtagagcaatatgagcgctccgagggtcgtcattctaccggtggcatggatgaactatacaaataagtttaaacccgctgatcagcctcgactgtgccttctagttgccagccatctgttgtttgcccctcccccgtgccttccttgaccctggaaggtgccactcccactgtcctttcctaataaaatgaggaaattgcatcgcattgtctgagtaggtgtcattctattctggggggtggggtggggcaggacagcaagggggaggattgggaagacaatagcaggcatgctggggatgcggtgggctctatggcttctgaggcggaaagaaccagctggggctctagggggtatccccacgcgccctgtagcggcgcattaagcgcggcgggtgtggtggttacgcgcagcgtgaccgctacacttgccagcgccctagcgcccgctcctttcgctttcttcccttcctttctcgccacgttcgccggctttccccgtcaagctctaaatcgggggctccctttagggttccgatttagtgctttacggcacctcgaccccaaaaaacttgattagggtgatggttcacgtagtgggccatcgccctgatagacggtttttcgccctttgacgttggagtccacgttctttaatagtggactcttgttccaaactggaacaacactcaaccctatctcggtctattcttttgatttataagggattttgccgatttcggcctattggttaaaaaatgagctgatttaacaaaaatttaacgcgaattaattctgtggaatgtgtgtcagttagggtgtggaaagtccccaggctccccagcaggcagaagtatgcaaagcatgcatctcaattagtcagcaaccaggtgtggaaagtccccaggctccccagcaggcagaagtatgcaaagcatgcatctcaattagtcagcaaccatagtcccgcccctaactccgcccatcccgcccctaactccgcccagttccgcccattctccgccccatggctgactaattttttttatttatgcagaggccgaggccgcctctgcctctgagctattccagaagtagtgaggaggcttttttggaggcctaggcttttgcaaaaagctcccgggagcttgtatatccattttcggatctgatcaagagacaggatgaggatcgtttcgcatgattgaacaagatggattgcacgcaggttctccggccgcttgggtggagaggctattcggctatgactgggcacaacagacaatcggctgctctgatgccgccgtgttccggctgtcagcgcaggggcgcccggttctttttgtcaagaccgacctgtccggtgccctgaatgaactgcaggacgaggcagcgcggctatcgtggctggccacgacgggcgttccttgcgcagctgtgctcgacgttgtcactgaagcgggaagggactggctgctattgggcgaagtgccggggcaggatctcctgtcatctcaccttgctcctgccgagaaagtatccatcatggctgatgcaatgcggcggctgcatacgcttgatccggctacctgcccattcgaccaccaagcgaaacatcgcatcgagcgagcacgtactcggatggaagccggtcttgtcgatcaggatgatctggacgaagagcatcaggggctcgcgccagccgaactgttcgccaggctcaaggcgcgcatgcccgacggcgaggatctcgtcgtgacccatggcgatgcctgcttgccgaatatcatggtggaaaatggccgcttttctggattcatcgactgtggccggctgggtgtggcggaccgctatcaggacatagcgttggctacccgtgatattgctgaagagcttggcggcgaatgggctgaccgcttcctcgtgctttacggtatcgccgctcccgattcgcagcgcatcgccttctatcgccttcttgacgagttcttctgagcgggactctggggttcgaaatgaccgaccaagcgacgcccaacctgccatcacgagatttcgattccaccgccgccttctatgaaaggttgggcttcggaatcgttttccgggacgccggctggatgatcctccagcgcggggatctcatgctggagttcttcgcccaccccaacttgtttattgcagcttataatggttacaaataaagcaatagcatcacaaatttcacaaataaagcatttttttcactgcattctagttgtggtttgtccaaactcatcaatgtatcttatcatgtctgtataccgtcgacctctagctagagcttggcgtaatcatggtcatagctgtttcctgtgtgaaattgttatccgctcacaattccacacaacatacgagccggaagcataaagtgtaaagcctggggtgcctaatgagtgagctaactcacattaattgcgttgcgctcactgcccgctttccagtcgggaaacctgtcgtgccagctgcattaatgaatcggccaacgcgcggggagaggcggtttgcgtattgggcgctcttccgcttcctcgctcactgactcgctgcgctcggtcgttcggctgcggcgagcggtatcagctcactcaaaggcggtaatacggttatccacagaatcaggggataacgcaggaaagaacatgtgagcaaaaggccagcaaaaggccaggaaccgtaaaaaggccgcgttgctggcgtttttccataggctccgcccccctgacgagcatcacaaaaatcgacgctcaagtcagaggtggcgaaacccgacaggactataaagataccaggcgtttccccctggaagctccctcgtgcgctctcctgttccgaccctgccgcttaccggatacctgtccgcctttctcccttcgggaagcgtggcgctttctcatagctcacgctgtaggtatctcagttcggtgtaggtcgttcgctccaagctgggctgtgtgcacgaaccccccgttcagcccgaccgctgcgccttatccggtaactatcgtcttgagtccaacccggtaagacacgacttatcgccactggcagcagccactggtaacaggattagcagagcgaggtatgtaggcggtgctacagagttcttgaagtggtggcctaactacggctacactagaagaacagtatttggtatctgcgctctgctgaagccagttaccttcggaaaaagagttggtagctcttgatccggcaaacaaaccaccgctggtagcggtttttttgtttgcaagcagcagattacgcgcagaaaaaaaggatctcaagaagatcctttgatcttttctacggggtctgacgctcagtggaacgaaaactcacgttaagggattttggtcatgagattatcaaaaaggatcttcacctagatccttttaaattaaaaatgaagttttaaatcaatctaaagtatatatgagtaaacttggtctgacagttaccaatgcttaatcagtgaggcacctatctcagcgatctgtctatttcgttcatccatagttgcctgactccccgtcgtgtagataactacgatacgggagggcttaccatctggccccagtgctgcaatgataccgcgagacccacgctcaccggctccagatttatcagcaataaaccagccagccggaagggccgagcgcagaagtggtcctgcaactttatccgcctccatccagtctattaattgttgccgggaagctagagtaagtagttcgccagttaatagtttgcgcaacgttgttgccattgctacaggcatcgtggtgtcacgctcgtcgtttggtatggcttcattcagctccggttcccaacgatcaaggcgagttacatgatcccccatgttgtgcaaaaaagcggttagctccttcggtcctccgatcgttgtcagaagtaagttggccgcagtgttatcactcatggttatggcagcactgcataattctcttactgtcatgccatccgtaagatgcttttctgtgactggtgagtactcaaccaagtcattctgagaatagtgtatgcggcgaccgagttgctcttgcccggcgtcaatacgggataataccgcgccacatagcagaactttaaaagtgctcatcattggaaaacgttcttcggggcgaaaactctcaaggatcttaccgctgttgagatccagttcgatgtaacccactcgtgcacccaactgatcttcagcatcttttactttcaccagcgtttctgggtgagcaaaaacaggaaggcaaaatgccgcaaaaaagggaataagggcgacacggaaatgttgaatactcatactcttcctttttcaatattattgaagcatttatcagggttattgtctcatgagcggatacatatttgaatgtatttagaaaaataaacaaataggggttccgcgcacatttccccgaaaagtgccacctgacgtc

SEQ ID NO: 107 - DNA, 9944 bp, synthetic construct
  misc_feature 1..9944: note = pMD130-pcDNA3.1-SARS2-mut-v4-GGSG-Myc-T2A-mScarlet
  source 1..9944: mol_type = other DNA
gacggatcgggagatctcccgatcccctatggtgcactctcagtacaatctgctctgatgccgcatagttaagccagtatctgctccctgcttgtgtgttggaggtcgctgagtagtgcgcgagcaaaatttaagctacaacaaggcaaggcttgaccgacaattgcatgaagaatctgcttagggttaggcgttttgcgctgcttcgcgatgtacgggccagatatacgcgttgacattgattattgactagttattaatagtaatcaattacggggtcattagttcatagcccatatatggagttccgcgttacataacttacggtaaatggcccgcctggctgaccgcccaacgacccccgcccattgacgtcaataatgacgtatgttcccatagtaacgccaatagggactttccattgacgtcaatgggtggagtatttacggtaaactgcccacttggcagtacatcaagtgtatcatatgccaagtacgccccctattgacgtcaatgacggtaaatggcccgcctggcattatgcccagtacatgaccttatgggactttcctacttggcagtacatctacgtattagtcatcgctattaccatggtgatgcggttttggcagtacatcaatgggcgtggatagcggtttgactcacggggatttccaagtctccaccccattgacgtcaatgggagtttgttttggcaccaaaatcaacgggactttccaaaatgtcgtaacaactccgccccattgacgcaaatgggcggtaggcgtgtacggtgggaggtctatataagcagagctctctggctaactagagaacccactgcttactggcttatcgaaattaatacgactcactatagggagacccaagctggatgtttgtgttcctggtgctgctgccactggtgtccagccagtgtgtgaacctgaccaccaggacccaacttcctcctgcctacaccaactccttcaccaggggagtctactaccctgacaaggtgttcaggtcctctgtgctgcacagcacccaggacctgttcctgccattcttcagcaatgtgacctggttccatgccatccatgtgtctggcaccaatggcaccaagaggtttgacaaccctgtgctgccattcaatgatggagtctactttgccagcacagagaagagcaacatcatcaggggctggatttttggcaccaccctggacagcaagacccagtccctgctgattgtgaacaatgccaccaatgtggtgattaaggtgtgtgagttccagttctgtaatgacccattcctgggagtctactaccacaagaacaacaagtcctggatggagtctgagttcagggtctactcctctgccaacaactgtacctttgaatatgtgagccaaccattcctgatggacttggagggcaagcagggcaacttcaagaacctgagggagtttgtgttcaagaacattgatggctacttcaagatttacagcaaacacacaccaatcaacctggtgagggacctgccacagggcttctctgccttggaaccactggtggacctgccaattggcatcaacatcaccaggttccagaccctgctggctctgcacaggtcctacctgacacctggagactcctcctctggctggacagcaggagcagcagcctactatgtgggctacctccaaccaaggaccttcctgctgaaatacaatgagaatggcaccatcacagatgctgtggactgtgccctggacccactgtctgagaccaagtgtaccctgaaatccttcacagtggagaagggcatctaccagaccagcaacttcagggtccaaccaacagagagcattgtgaggtttccaaacatcaccaacctgtgtccatttggagaggtgttcaatgccaccaggtttgcctctgtctatgcctggaacaggaagaggattagcaactgtgtggctgactactctgtgctctacaactctgcctccttcagcaccttcaagtgttatggagtgagcccaaccaaactgaatgacctgtgtttcaccaatgtctatgctgactcctttgtgattaggggagatgaggtgagacagattgcccctggacaaacaggcgccattgctgactacaactacaaactgcctgatgacttcacaggctgtgtgattgcctggaacagcgccaacctggacagcaaggtgggaggcaacgccaactacctctacagagccgctaggaagagcaacctgaaaccatttgagagggacatcagcacagagattgccgctgctggcagcacaccatgtaatggagtggagggcgccgcttgttactttccactcgcctcctatggcttcgccccagctgccggagtgggctaccaaccatacagggtggtggtgctgtcctttgaactgctccatgcccctgccacagtgtgtggaccaaagaagagcaccaacctggtgaagaacaagtgtgtgaacttcaacgccaatggactgacaggcacaggagtgctgacagagagcaacaagaagttcctgccattccaacagtttggcagggacattgctgacaccacagatgctgtgagggacccacagaccttggagattctggacatcacaccatgttcctttggaggagtgtctgtgattacacctggcaccaacaccagcaaccaggtggctgtgctctaccaggatgtgaactgtactgaggtgcctgtggctatccatgctgaccaacttacaccaacctggagggtctacagcacaggcagcaatgtgttccagaccagggctggctgtctgattggagcagagcatgtgaacaactcctatgagtgtgacatcccaattggagcaggcatctgtgcctcctaccagacccagaccaacagcccaaggagggcaaggtctgtggcaagccagagcatcattgcctacacaatgagtctgggagcagagaactctgtggcttacagcaacaacagcattgccatcccaaccaacttcaccatctctgtgaccacagagattctgcctgtgagtatgaccaagacctctgtggactgtacaatgtatatctgtggagacagcacagagtgtagcaacctgctgctccaatatggctccttctgtacccaacttaacagggctctgacaggcattgctgtggaacaggacaagaacacccaggaggtgtttgcccaggtgaagcagatttacaagacacctccaatcaaggactttggaggcttcaacttcagccagattctgcctgacccaagcaagccaagcaagaggtccttcattgaggacctgctgttcaacaaggtgaccctggctgatgctggcttcatcaagcaatatggagactgtctgggagacattgctgccagggacctgatttgtgcccagaagttcaatggactgacagtgctgcctccactgctgacagatgagatgattgcccaatacacctctgccctgctggctggcaccatcacctctggctggacctttggagcaggagcagccctccaaatcccatttgctatgcagatggcttacaggttcaatggcattggagtgacccagaatgtgctctatgagaaccagaaactgattgccaaccagttcaactctgccattggcaagattcaggactccctgtccagcacagcctctgccctgggcaaactccaagatgtggtgaaccagaatgcccaggctctgaacaccctggtgaagcaactttccagcaactttggagccatctcctctgtgctgaatgacatcctgagcagactggacaaggtggaggctgaggtccagattgacagactgattacaggcagactccaatccctccaaacctatgtgacccaacaacttatcagggctgctgagattagggcatctgccaacctggctgccaccaagatgagtgagtgtgtgctgggacaaagcaagagggtggacttctgtggcaagggctaccacctgatgagttttccacagtctgcccctcatggagtggtgttcctgcatgtgacctatgtgcctgcccaggagaagaacttcaccacagcccctgccatctgccatgatggcaaggctcactttccaagggagggagtgtttgtgagcaatggcacccactggtttgtgacccagaggaacttctatgaaccacagattatcaccacagacaacacctttgtgtctggcaactgtgatgtggtgattggcattgtgaacaacacagtctatgacccactccaacctgaactggactccttcaaggaggaactggacaaatacttcaagaaccacaccagccctgatgtggacctgggagacatctctggcatcaatgcctctgtggtgaacatccagaaggagattgacagactgaatgaggtggctaagaacctgaatgagtccctgattgacctccaagaactgggcaaatatgaacaatacatcaagtggccatggtacatctggctgggcttcattgctggactgattgccattgtgatggtgaccataatgctgtgttgtatgacctcctgttgttcctgtctgaaaggctgttgttcctgtggctcctgttgtaagtttgatgaggatgactctgaacctgtgctgaaaggagtgaaactgcactacaccggcggaggcagcggggagcaaaaacttatctctgaagaggacctcggcagtggagagggcagaggaagtctgctaacatgcggtgacgtcgaggagaatcctggcccaatgagtaaaggagaagctgtgattaaagagttcatgcgcttcaaagttcacatggagggttctatgaacggtcacgagttcgagatcgaaggcgaaggcgagggccgtccgtatgaaggcacccagaccgccaaactgaaagtgactaaaggcggcccgctgcctttttcctgggacatcctgagcccgcaatttatgtacggttctagggcgttcaccaaacacccagcggatatcccggactattataagcagtcttttccggaaggtttcaagtgggaacgcgtaatgaattttgaagatggtggtgccgtgaccgtcactcaggacacctccctggaggatggcaccctgatctataaagttaaactgcgtggtactaattttccacctgatggcccggtgatgcagaaaaagacgatgggttgggaggcgtctaccgaacgcttgtatccggaagatggtgtgctgaaaggcgacattaaaatggccctgcgcctgaaagatggcggccgctatctggctgacttcaaaaccacgtacaaagccaagaaacctgtgcagatgcctggcgcgtacaatgtggaccgcaaactggacatcacctctcataatgaagattatacggtggtagagcaatatgagcgctccgagggtcgtcattctaccggtggcatggatgaactatacaaataagtttaaacccgctgatcagcctcgactgtgccttctagttgccagccatctgttgtttgcccctcccccgtgccttccttgaccctggaaggtgccactcccactgtcctttcctaataaaatgaggaaattgcatcgcattgtctgagtaggtgtcattctattctggggggtggggtggggcaggacagcaagggggaggattgggaagacaatagcaggcatgctggggatgcggtgggctctatggcttctgaggcggaaagaaccagctggggctctagggggtatccccacgcgccctgtagcggcgcattaagcgcggcgggtgtggtggttacgcgcagcgtgaccgctacacttgccagcgccctagcgcccgctcctttcgctttcttcccttcctttctcgccacgttcgccggctttccccgtcaagctctaaatcgggggctccctttagggttccgatttagtgctttacggcacctcgaccccaaaaaacttgattagggtgatggttcacgtagtgggccatcgccctgatagacggtttttcgccctttgacgttggagtccacgttctttaatagtggactcttgttccaaactggaacaacactcaaccctatctcggtctattcttttgatttataagggattttgccgatttcggcctattggttaaaaaatgagctgatttaacaaaaatttaacgcgaattaattctgtggaatgtgtgtcagttagggtgtggaaagtccccaggctccccagcaggcagaagtatgcaaagcatgcatctcaattagtcagcaaccaggtgtggaaagtccccaggctccccagcaggcagaagtatgcaaagcatgcatctcaattagtcagcaaccatagtcccgcccctaactccgcccatcccgcccctaactccgcccagttccgcccattctccgccccatggctgactaattttttttatttatgcagaggccgaggccgcctctgcctctgagctattccagaagtagtgaggaggcttttttggaggcctaggcttttgcaaaaagctcccgggagcttgtatatccattttcggatctgatcaagagacaggatgaggatcgtttcgcatgattgaacaagatggattgcacgcaggttctccggccgcttgggtggagaggctattcggctatgactgggcacaacagacaatcggctgctctgatgccgccgtgttccggctgtcagcgcaggggcgcccggttctttttgtcaagaccgacctgtccggtgccctgaatgaactgcaggacgaggcagcgcggctatcgtggctggccacgacgggcgttccttgcgcagctgtgctcgacgttgtcactgaagcgggaagggactggctgctattgggcgaagtgccggggcaggatctcctgtcatctcaccttgctcctgccgagaaagtatccatcatggctgatgcaatgcggcggctgcatacgcttgatccggctacctgcccattcgaccaccaagcgaaacatcgcatcgagcgagcacgtactcggatggaagccggtcttgtcgatcaggatgatctggacgaagagcatcaggggctcgcgccagccgaactgttcgccaggctcaaggcgcgcatgcccgacggcgaggatctcgtcgtgacccatggcgatgcctgcttgccgaatatcatggtggaaaatggccgcttttctggattcatcgactgtggccggctgggtgtggcggaccgctatcaggacatagcgttggctacccgtgatattgctgaagagcttggcggcgaatgggctgaccgcttcctcgtgctttacggtatcgccgctcccgattcgcagcgcatcgccttctatcgccttcttgacgagttcttctgagcgggactctggggttcgaaatgaccgaccaagcgacgcccaacctgccatcacgagatttcgattccaccgccgccttctatgaaaggttgggcttcggaatcgttttccgggacgccggctggatgatcctccagcgcggggatctcatgctggagttcttcgcccaccccaacttgtttattgcagcttataatggttacaaataaagcaatagcatcacaaatttcacaaataaagcatttttttcactgcattctagttgtggtttgtccaaactcatcaatgtatcttatcatgtctgtataccgtcgacctctagctagagcttggcgtaatcatggtcatagctgtttcctgtgtgaaattgttatccgctcacaattccacacaacatacgagccggaagcataaagtgtaaagcctggggtgcctaatgagtgagctaactcacattaattgcgttgcgctcactgcccgctttccagtcgggaaacctgtcgtgccagctgcattaatgaatcggccaacgcgcggggagaggcggtttgcgtattgggcgctcttccgcttcctcgctcactgactcgctgcgctcggtcgttcggctgcggcgagcggtatcagctcactcaaaggcggtaatacggttatccacagaatcaggggataacgcaggaaagaacatgtgagcaaaaggccagcaaaaggccaggaaccgtaaaaaggccgcgttgctggcgtttttccataggctccgcccccctgacgagcatcacaaaaatcgacgctcaagtcagaggtggcgaaacccgacaggactataaagataccaggcgtttccccctggaagctccctcgtgcgctctcctgttccgaccctgccgcttaccggatacctgtccgcctttctcccttcgggaagcgtggcgctttctcatagctcacgctgtaggtatctcagttcggtgtaggtcgttcgctccaagctgggctgtgtgcacgaaccccccgttcagcccgaccgctgcgccttatccggtaactatcgtcttgagtccaacccggtaagacacgacttatcgccactggcagcagccactggtaacaggattagcagagcgaggtatgtaggcggtgctacagagttcttgaagtggtggcctaactacggctacactagaagaacagtatttggtatctgcgctctgctgaagccagttaccttcggaaaaagagttggtagctcttgatccggcaaacaaaccaccgctggtagcggtttttttgtttgcaagcagcagattacgcgcagaaaaaaaggatctcaagaagatcctttgatcttttctacggggtctgacgctcagtggaacgaaaactcacgttaagggattttggtcatgagattatcaaaaaggatcttcacctagatccttttaaattaaaaatgaagttttaaatcaatctaaagtatatatgagtaaacttggtctgacagttaccaatgcttaatcagtgaggcacctatctcagcgatctgtctatttcgttcatccatagttgcctgactccccgtcgtgtagataactacgatacgggagggcttaccatctggccccagtgctgcaatgataccgcgagacccacgctcaccggctccagatttatcagcaataaaccagccagccggaagggccgagcgcagaagtggtcctgcaactttatccgcctccatccagtctattaattgttgccgggaagctagagtaagtagttcgccagttaatagtttgcgcaacgttgttgccattgctacaggcatcgtggtgtcacgctcgtcgtttggtatggcttcattcagctccggttcccaacgatcaaggcgagttacatgatcccccatgttgtgcaaaaaagcggttagctccttcggtcctccgatcgttgtcagaagtaagttggccgcagtgttatcactcatggttatggcagcactgcataattctcttactgtcatgccatccgtaagatgcttttctgtgactggtgagtactcaaccaagtcattctgagaatagtgtatgcggcgaccgagttgctcttgcccggcgtcaatacgggataataccgcgccacatagcagaactttaaaagtgctcatcattggaaaacgttcttcggggcgaaaactctcaaggatcttaccgctgttgagatccagttcgatgtaacccactcgtgcacccaactgatcttcagcatcttttactttcaccagcgtttctgggtgagcaaaaacaggaaggcaaaatgccgcaaaaaagggaataagggcgacacggaaatgttgaatactcatactcttcctttttcaatattattgaagcatttatcagggttattgtctcatgagcggatacatatttgaatgtatttagaaaaataaacaaataggggttccgcgcacatttccccgaaaagtgccacctgacgtc

SEQ ID NO: 108 - DNA, 9266 bp, synthetic construct
  misc_feature 1..9266: note = pMD131_pcDNA3.1_SARS-CoV-2_stablized-S-protein_mut_v1
  source 1..9266: mol_type = other DNA
gacggatcgggagatctcccgatcccctatggtgcactctcagtacaatctgctctgatgccgcatagttaagccagtatctgctccctgcttgtgtgttggaggtcgctgagtagtgcgcgagcaaaatttaagctacaacaaggcaaggcttgaccgacaattgcatgaagaatctgcttagggttaggcgttttgcgctgcttcgcgatgtacgggccagatatacgcgttgacattgattattgactagttattaatagtaatcaattacggggtcattagttcatagcccatatatggagttccgcgttacataacttacggtaaatggcccgcctggctgaccgcccaacgacccccgcccattgacgtcaataatgacgtatgttcccatagtaacgccaatagggactttccattgacgtcaatgggtggagtatttacggtaaactgcccacttggcagtacatcaagtgtatcatatgccaagtacgccccctattgacgtcaatgacggtaaatggcccgcctggcattatgcccagtacatgaccttatgggactttcctacttggcagtacatctacgtattagtcatcgctattaccatggtgatgcggttttggcagtacatcaatgggcgtggatagcggtttgactcacggggatttccaagtctccaccccattgacgtcaatgggagtttgttttggcaccaaaatcaacgggactttccaaaatgtcgtaacaactccgccccattgacgcaaatgggcggtaggcgtgtacggtgggaggtctatataagcagagctctctggctaactagagaacccactgcttactggcttatcgaaattaatacgactcactatagggagacccaagctggatgtttgtgttcctggtgctgctgccactggtgtccagccagtgtgtgaacctgaccaccaggacccaacttcctcctgcctacaccaactccttcaccaggggagtctactaccctgacaaggtgttcaggtcctctgtgctgcacagcacccaggacctgttcctgccattcttcagcaatgtgacctggttccatgccatccatgtgtctggcaccaatggcaccaagaggtttgacaaccctgtgctgccattcaatgatggagtctactttgccagcacagagaagagcaacatcatcaggggctggatttttggcaccaccctggacagcaagacccagtccctgctgattgtgaacaatgccaccaatgtggtgattaaggtgtgtgagttccagttctgtaatgacccattcctgggagtctactaccacaagaacaacaagtcctggatggagtctgagttcagggtctactcctctgccaacaactgtacctttgaatatgtgagccaaccattcctgatggacttggagggcaagcagggcaacttcaagaacctgagggagtttgtgttcaagaacattgatggctacttcaagatttacagcaaacacacaccaatcaacctggtgagggacctgccacagggcttctctgccttggaaccactggtggacctgccaattggcatcaacatcaccaggttccagaccctgctggctctgcacaggtcctacctgacacctggagactcctcctctggctggacagcaggagcagcagcctactatgtgggctacctccaaccaaggaccttcctgctgaaatacaatgagaatggcaccatcacagatgctgagggcaagcagggcaacttcaagaacctgagggagtttgtgttcaagaacattgatggctacttcaagatttacagcaaacacacaccaatcaacctggtgagggacctgccacagggcttctctgccttggaaccactggtggacctgccaattggcatcaacatcaccaggttccagaccctgctggctctgcacaggtcctacctgacacctggagactcctcctctggctggacagcaggagcagcagcctactatgtgggctacctccaaccaaggaccttcctgctgaaatacaatgagaatggcaccatcacagatgctgtggactgtgccctggacccactgtctgagaccaagtgtaccctgaaatccttcacagtggagaagggcatctaccagaccagcaacttcagggtccaaccaacagagagcattgtgaggtttccaaacatcaccaacctgtgtccatttggagaggtgttcaatgccaccaggtttgcctctgtctatgcctggaacaggaagaggattagcaactgtgtggctgactactctgtgctctacaactctgcctccttcagcaccttcaagtgttatggagtgagcccaaccaaactgaatgacctgtgtttcaccaatgtctatgctgactcctttgtgattaggggagatgaggtgagacagattgcccctggacaaacaggcaagattgctgactacaactacaaactgcctgatgacttcacaggctgtgtgattgcctggaacagcgccaacctggacagcaaggtgggaggcaacgccaactacctctacagactgttcaggaagagcaacctgaaaccatttgagagggacatcagcacagagatttaccaggctggcagcacaccatgtaatggagtggagggcttcaactgttactttccactccaatcctatggcttcgccccagctgccggagtgggctaccaaccatacagggtggtggtgctgtcctttgaactgctccatgcccctgccacagtgtgtggaccaaagaagagcaccaacctggtgaagaacaagtgtgtgaacttcaacttcaatggactgacaggcacaggagtgctgacagagagcaacaagaagttcctgccattccaacagtttggcagggacattgctgacaccacagatgctgtgagggacccacagaccttggagattctggacatcacaccatgttcctttggaggagtgtctgtgattacacctggcaccaacaccagcaaccaggtggctgtgctctaccaggatgtgaactgtactgaggtgcctgtggctatccatgctgaccaacttacaccaacctggagggtctacagcacaggcagcaatgtgttccagaccagggctggctgtctgattggagcagagcatgtgaacaactcctatgagtgtgacatcccaattggagcaggcatctgtgcctcctaccagacccagaccaacagcccaaggagggcaaggtctgtggcaagccagagcatcattgcctacacaatgagtctgggagcagagaactctgtggcttacagcaacaacagcattgccatcccaaccaacttcaccatctctgtgaccacagagattctgcctgtgagtatgaccaagacctctgtggactgtacaatgtatatctgtggagacagcacagagtgtagcaacctgctgctccaatatggctccttctgtacccaacttaacagggctctgacaggcattgctgtggaacaggacaagaacacccaggaggtgtttgcccaggtgaagcagatttacaagacacctccaatcaaggactttggaggcttcaacttcagccagattctgcctgacccaagcaagccaagcaagaggtccttcattgaggacctgctgttcaacaaggtgaccctggctgatgctggcttcatcaagcaatatggagactgtctgggagacattgctgccagggacctgatttgtgcccagaagttcaatggactgacagtgctgcctccactgctgacagatgagatgattgcccaatacacctctgccctgctggctggcaccatcacctctggctggacctttggagcaggagcagccctccaaatcccatttgctatgcagatggcttacaggttcaatggcattggagtgacccagaatgtgctctatgagaaccagaaactgattgccaaccagttcaactctgccattggcaagattcaggactccctgtccagcacagcctctgccctgggcaaactccaagatgtggtgaaccagaatgcccaggctctgaacaccctggtgaagcaactttccagcaactttggagccatctcctctgtgctgaatgacatcctgagcagactggaccctcccgaggctgaggtccagattgacagactgattacaggcagactccaatccctccaaacctatgtgacccaacaacttatcagggctgctgagattagggcatctgccaacctggctgccaccaagatgagtgagtgtgtgctgggacaaagcaagagggtggacttctgtggcaagggctaccacctgatgagttttccacagtctgcccctcatggagtggtgttcctgcatgtgacctatgtgcctgcccaggagaagaacttcaccacagcccctgccatctgccatgatggcaaggctcactttccaagggagggagtgtttgtgagcaatggcacccactggtttgtgacccagaggaacttctatgaaccacagattatcaccacagacaacacctttgtgtctggcaactgtgatgtggtgattggcattgtgaacaacacagtctatgacccactccaacctgaactggactccttcaaggaggaactggacaaatacttcaagaaccacaccagccctgatgtggacctgggagacatctctggcatcaatgcctctgtggtgaacatccagaaggagattgacagactgaatgaggtggctaagaacctgaatgagtccctgattgacctccaagaactgggcaaataagtttaaacccgctgatcagcctcgactgtgccttctagttgccagccatctgttgtttgcccctcccccgtgccttccttgaccctggaaggtgccactcccactgtcctttcctaataaaatgaggaaattgcatcgcattgtctgagtaggtgtcattctattctggggggtggggtggggcaggacagcaagggggaggattgggaagacaatagcaggcatgctggggatgcggtgggctctatggcttctgaggcggaaagaaccagctggggctctagggggtatccccacgcgccctgtagcggcgcattaagcgcggcgggtgtggtggttacgcgcagcgtgaccgctacacttgccagcgccctagcgcccgctcctttcgctttcttcccttcctttctcgccacgttcgccggctttccccgtcaagctctaaatcgggggctccctttagggttccgatttagtgctttacggcacctcgaccccaaaaaacttgattagggtgatggttcacgtagtgggccatcgccctgatagacggtttttcgccctttgacgttggagtccacgttctttaatagtggactcttgttccaaactggaacaacactcaaccctatctcggtctattcttttgatttataagggattttgccgatttcggcctattggttaaaaaatgagctgatttaacaaaaatttaacgcgaattaattctgtggaatgtgtgtcagttagggtgtggaaagtccccaggctccccagcaggcagaagtatgcaaagcatgcatctcaattagtcagcaaccaggtgtggaaagtccccaggctccccagcaggcagaagtatgcaaagcatgcatctcaattagtcagcaaccatagtcccgcccctaactccgcccatcccgcccctaactccgcccagttccgcccattctccgccccatggctgactaattttttttatttatgcagaggccgaggccgcctctgcctctgagctattccagaagtagtgaggaggcttttttggaggcctaggcttttgcaaaaagctcccgggagcttgtatatccattttcggatctgatcaagagacaggatgaggatcgtttcgcatgattgaacaagatggattgcacgcaggttctccggccgcttgggtggagaggctattcggctatgactgggcacaacagacaatcggctgctctgatgccgccgtgttccggctgtcagcgcaggggcgcccggttctttttgtcaagaccgacctgtccggtgccctgaatgaactgcaggacgaggcagcgcggctatcgtggctggccacgacgggcgttccttgcgcagctgtgctcgacgttgtcactgaagcgggaagggactggctgctattgggcgaagtgccggggcaggatctcctgtcatctcaccttgctcctgccgagaaagtatccatcatggctgatgcaatgcggcggctgcatacgcttgatccggctacctgcccattcgaccaccaagcgaaacatcgcatcgagcgagcacgtactcggatggaagccggtcttgtcgatcaggatgatctggacgaagagcatcaggggctcgcgccagccgaactgttcgccaggctcaaggcgcgcatgcccgacggcgaggatctcgtcgtgacccatggcgatgcctgcttgccgaatatcatggtggaaaatggccgcttttctggattcatcgactgtggccggctgggtgtggcggaccgctatcaggacatagcgttggctacccgtgatattgctgaagagcttggcggcgaatgggctgaccgcttcctcgtgctttacggtatcgccgctcccgattcgcagcgcatcgccttctatcgccttcttgacgagttcttctgagcgggactctggggttcgaaatgaccgaccaagcgacgcccaacctgccatcacgagatttcgattccaccgccgccttctatgaaaggttgggcttcggaatcgttttccgggacgccggctggatgatcctccagcgcggggatctcatgctggagttcttcgcccaccccaacttgtttattgcagcttataatggttacaaataaagcaatagcatcacaaatttcacaaataaagcatttttttcactgcattctagttgtggtttgtccaaactcatcaatgtatcttatcatgtctgtataccgtcgacctctagctagagcttggcgtaatcatggtcatagctgtttcctgtgtgaaattgttatccgctcacaattccacacaacatacgagccggaagcataaagtgtaaagcctggggtgcctaatgagtgagctaactcacattaattgcgttgcgctcactgcccgctttccagtcgggaaacctgtcgtgccagctgcattaatgaatcggccaacgcgcggggagaggcggtttgcgtattgggcgctcttccgcttcctcgctcactgactcgctgcgctcggtcgttcggctgcggcgagcggtatcagctcactcaaaggcggtaatacggttatccacagaatcaggggataacgcaggaaagaacatgtgagcaaaaggccagcaaaaggccaggaaccgtaaaaaggccgcgttgctggcgtttttccataggctccgcccccctgacgagcatcacaaaaatcgacgctcaagtcagaggtggcgaaacccgacaggactataaagataccaggcgtttccccctggaagctccctcgtgcgctctcctgttccgaccctgccgcttaccggatacctgtccgcctttctcccttcgggaagcgtggcgctttctcatagctcacgctgtaggtatctcagttcggtgtaggtcgttcgctccaagctgggctgtgtgcacgaaccccccgttcagcccgaccgctgcgccttatccggtaactatcgtcttgagtccaacccggtaagacacgacttatcgccactggcagcagccactggtaacaggattagcagagcgaggtatgtaggcggtgctacagagttcttgaagtggtggcctaactacggctacactagaagaacagtatttggtatctgcgctctgctgaagccagttaccttcggaaaaagagttggtagctcttgatccggcaaacaaaccaccgctggtagcggtttttttgtttgcaagcagcagattacgcgcagaaaaaaaggatctcaagaagatcctttgatcttttctacggggtctgacgctcagtggaacgaaaactcacgttaagggattttggtcatgagattatcaaaaaggatcttcacctagatccttttaaattaaaaatgaagttttaaatcaatctaaagtatatatgagtaaacttggtctgacagttaccaatgcttaatcagtgaggcacctatctcagcgatctgtctatttcgttcatccatagttgcctgactccccgtcgtgtagataactacgatacgggagggcttaccatctggccccagtgctgcaatgataccgcgagacccacgctcaccggctccagatttatcagcaataaaccagccagccggaagggccgagcgcagaagtggtcctgcaactttatccgcctccatccagtctattaattgttgccgggaagctagagtaagtagttcgccagttaatagtttgcgcaacgttgttgccattgctacaggcatcgtggtgtcacgctcgtcgtttggtatggcttcattcagctccggttcccaacgatcaaggcgagttacatgatcccccatgttgtgcaaaaaagcggttagctccttcggtcctccgatcgttgtcagaagtaagttggccgcagtgttatcactcatggttatggcagcactgcataattctcttactgtcatgccatccgtaagatgcttttctgtgactggtgagtactcaaccaagtcattctgagaatagtgtatgcggcgaccgagttgctcttgcccggcgtcaatacgggataataccgcgccacatagcagaactttaaaagtgctcatcattggaaaacgttcttcggggcgaaaactctcaaggatcttaccgctgttgagatccagttcgatgtaacccactcgtgcacccaactgatcttcagcatcttttactttcaccagcgtttctgggtgagcaaaaacaggaaggcaaaatgccgcaaaaaagggaataagggcgacacggaaatgttgaatactcatactcttcctttttcaatattattgaagcatttatcagggttattgtctcatgagcggatacatatttgaatgtatttagaaaaataaacaaataggggttccgcgcacatttccccgaaaagtgccacctgacgtc

SEQ ID NO: 109 - DNA, 9266 bp, synthetic construct
  misc_feature 1..9266: note = pMD132_pcDNA3.1_SARS-CoV-2_stablized-S-protein_mut_v2
  source 1..9266: mol_type = other DNA
gacggatcgggagatctcccgatcccctatggtgcactctcagtacaatctgctctgatgccgcatagttaagccagtatctgctccctgcttgtgtgttggaggtcgctgagtagtgcgcgagcaaaatttaagctacaacaaggcaaggcttgaccgacaattgcatgaagaatctgcttagggttaggcgttttgcgctgcttcgcgatgtacgggccagatatacgcgttgacattgattattgactagttattaatagtaatcaattacggggtcattagttcatagcccatatatggagttccgcgttacataacttacggtaaatggcccgcctggctgaccgcccaacgacccccgcccattgacgtcaataatgacgtatgttcccatagtaacgccaatagggactttccattgacgtcaatgggtggagtatttacggtaaactgcccacttggcagtacatcaagtgtatcatatgccaagtacgccccctattgacgtcaatgacggtaaatggcccgcctggcattatgcccagtacatgaccttatgggactttcctacttggcagtacatctacgtattagtcatcgctattaccatggtgatgcggttttggcagtacatcaatgggcgtggatagcggtttgactcacggggatttccaagtctccaccccattgacgtcaatgggagtttgttttggcaccaaaatcaacgggactttccaaaatgtcgtaacaactccgccccattgacgcaaatgggcggtaggcgtgtacggtgggaggtctatataagcagagctctctggctaactagagaacccactgcttactggcttatcgaaattaatacgactcactatagggagacccaagctggatgtttgtgttcctggtgctgctgccactggtgtccagccagtgtgtgaacctgaccaccaggacccaacttcctcctgcctacaccaactccttcaccaggggagtctactaccctgacaaggtgttcaggtcctctgtgctgcacagcacccaggacctgttcctgccattcttcagcaatgtgacctggttccatgccatccatgtgtctggcaccaatggcaccaagaggtttgacaaccctgtgctgccattcaatgatggagtctactttgccagcacagagaagagcaacatcatcaggggctggatttttggcaccaccctggacagcaagacccagtccctgctgattgtgaacaatgccaccaatgtggtgattaaggtgtgtgagttccagttctgtaatgacccattcctgggagtctactaccacaagaacaacaagtcctggatggagtctgagttcagggtctactcctctgccaacaactgtacctttgaatatgtgagccaaccattcctgatggacttggagggcaagcagggcaacttcaagaacctgagggagtttgtgttcaagaacattgatggctacttcaagatttacagcaaacacacaccaatcaacctggtgagggacctgccacagggcttctctgccttggaaccactggtggacctgccaattggcatcaacatcaccaggttccagaccctgctggctctgcacaggtcctacctgacacctggagactcctcctctggctggacagcaggagcagcagcctactatgtgggctacctccaaccaaggaccttcctgctgaaatacaatgagaatggcaccatcacagatgctgagggcaagcagggcaacttcaagaacctgagggagtttgtgttcaagaacattgatggctacttcaagatttacagcaaacacacaccaatcaacctggtgagggacctgccacagggcttctctgccttggaaccactggtggacctgccaattggcatcaacatcaccaggttccagaccctgctggctctgcacaggtcctacctgacacctggagactcctcctctggctggacagcaggagcagcagcctactatgtgggctacctccaaccaaggaccttcctgctgaaatacaatgagaatggcaccatcacagatgctgtggactgtgccctggacccactgtctgagaccaagtgtaccctgaaatccttcacagtggagaagggcatctaccagaccagcaacttcagggtccaaccaacagagagcattgtgaggtttccaaacatcaccaacctgtgtccatttggagaggtgttcaatgccaccaggtttgcctctgtctatgcctggaacaggaagaggattagcaactgtgtggctgactactctgtgctctacaactctgcctccttcagcaccttcaagtgttatggagtgagcccaaccaaactgaatgacctgtgtttcaccaatgtctatgctgactcctttgtgattaggggagatgaggtgagacagattgcccctggacaaacaggcgccattgctgactacaactacaaactgcctgatgacttcacaggctgtgtgattgcctggaacagcaacaacctggacagcaaggtgggaggcaactacaactacctctacagagccgctaggaagagcaacctgaaaccatttgagagggacatcagcacagagattgcccaggctggcagcacaccatgtaatggagtggagggcttcaactgttactttccactcgcctcctatggcttccaaccaaccaatggagtgggctaccaaccatacagggtggtggtgctgtcctttgaactgctccatgcccctgccacagtgtgtggaccaaagaagagcaccaacctggtgaagaacaagtgtgtgaacttcaacgccaatggactgacaggcacaggagtgctgacagagagcaacaagaagttcctgccattccaacagtttggcagggacattgctgacaccacagatgctgtgagggacccacagaccttggagattctggacatcacaccatgttcctttggaggagtgtctgtgattacacctggcaccaacaccagcaaccaggtggctgtgctctaccaggatgtgaactgtactgaggtgcctgtggctatccatgctgaccaacttacaccaacctggagggtctacagcacaggcagcaatgtgttccagaccagggctggctgtctgattggagcagagcatgtgaacaactcctatgagtgtgacatcccaattggagcaggcatctgtgcctcctaccagacccagaccaacagcccaaggagggcaaggtctgtggcaagccagagcatcattgcctacacaatgagtctgggagcagagaactctgtggcttacagcaacaacagcattgccatcccaaccaacttcaccatctctgtgaccacagagattctgcctgtgagtatgaccaagacctctgtggactgtacaatgtatatctgtggagacagcacagagtgtagcaacctgctgctccaatatggctccttctgtacccaacttaacagggctctgacaggcattgctgtggaacaggacaagaacacccaggaggtgtttgcccaggtgaagcagatttacaagacacctccaatcaaggactttggaggcttcaacttcagccagattctgcctgacccaagcaagccaagcaagaggtccttcattgaggacctgctgttcaacaaggtgaccctggctgatgctggcttcatcaagcaatatggagactgtctgggagacattgctgccagggacctgatttgtgcccagaagttcaatggactgacagtgctgcctccactgctgacagatgagatgattgcccaatacacctctgccctgctggctggcaccatcacctctggctggacctttggagcaggagcagccctccaaatcccatttgctatgcagatggcttacaggttcaatggcattggagtgacccagaatgtgctctatgagaaccagaaactgattgccaaccagttcaactctgccattggcaagattcaggactccctgtccagcacagcctctgccctgggcaaactccaagatgtggtgaaccagaatgcccaggctctgaacaccctggtgaagcaactttccagcaactttggagccatctcctctgtgctgaatgacatcctgagcagactggaccctcccgaggctgaggtccagattgacagactgattacaggcagactccaatccctccaaacctatgtgacccaacaacttatcagggctgctgagattagggcatctgccaacctggctgccaccaagatgagtgagtgtgtgctgggacaaagcaagagggtggacttctgtggcaagggctaccacctgatgagttttccacagtctgcccctcatggagtggtgttcctgcatgtgacctatgtgcctgcccaggagaagaacttcaccacagcccctgccatctgccatgatggcaaggctcactttccaagggagggagtgtttgtgagcaatggcacccactggtttgtgacccagaggaacttctatgaaccacagattatcaccacagacaacacctttgtgtctggcaactgtgatgtggtgattggcattgtgaacaacacagtctatgacccactccaacctgaactggactccttcaaggaggaactggacaaatacttcaagaaccacaccagccctgatgtggacctgggagacatctctggcatcaatgcctctgtggtgaacatccagaaggagattgacagactgaatgaggtggctaagaacctgaatgagtccctgattgacctccaagaactgggcaaataagtttaaacccgctgatcagcctcgactgtgccttctagttgccagccatctgttgtttgcccctcccccgtgccttccttgaccctggaaggtgccactcccactgtcctttcctaataaaatgaggaaattgcatcgcattgtctgagtaggtgtcattctattctggggggtggggtggggcaggacagcaagggggaggattgggaagacaatagcaggcatgctggggatgcggtgggctctatggcttctgaggcggaaagaaccagctggggctctagggggtatccccacgcgccctgtagcggcgcattaagcgcggcgggtgtggtggttacgcgcagcgtgaccgctacacttgccagcgccctagcgcccgctcctttcgctttcttcccttcctttctcgccacgttcgccggctttccccgtcaagctctaaatcgggggctccctttagggttccgatttagtgctttacggcacctcgaccccaaaaaacttgattagggtgatggttcacgtagtgggccatcgccctgatagacggtttttcgccctttgacgttggagtccacgttctttaatagtggactcttgttccaaactggaacaacactcaaccctatctcggtctattcttttgatttataagggattttgccgatttcggcctattggttaaaaaatgagctgatttaacaaaaatttaacgcgaattaattctgtggaatgtgtgtcagttagggtgtggaaagtccccaggctccccagcaggcagaagtatgcaaagcatgcatctcaattagtcagcaaccaggtgtggaaagtccccaggctccccagcaggcagaagtatgcaaagcatgcatctcaattagtcagcaaccatagtcccgcccctaactccgcccatcccgcccctaactccgcccagttccgcccattctccgccccatggctgactaattttttttatttatgcagaggccgaggccgcctctgcctctgagctattccagaagtagtgaggaggcttttttggaggcctaggcttttgcaaaaagctcccgggagcttgtatatccattttcggatctgatcaagagacaggatgaggatcgtttcgcatgattgaacaagatggattgcacgcaggttctccggccgcttgggtggagaggctattcggctatgactgggcacaacagacaatcggctgctctgatgccgccgtgttccggctgtcagcgcaggggcgcccggttctttttgtcaagaccgacctgtccggtgccctgaatgaactgcaggacgaggcagcgcggctatcgtggctggccacgacgggcgttccttgcgcagctgtgctcgacgttgtcactgaagcgggaagggactggctgctattgggcgaagtgccggggcaggatctcctgtcatctcaccttgctcctgccgagaaagtatccatcatggctgatgcaatgcggcggctgcatacgcttgatccggctacctgcccattcgaccaccaagcgaaacatcgcatcgagcgagcacgtactcggatggaagccggtcttgtcgatcaggatgatctggacgaagagcatcaggggctcgcgccagccgaactgttcgccaggctcaaggcgcgcatgcccgacggcgaggatctcgtcgtgacccatggcgatgcctgcttgccgaatatcatggtggaaaatggccgcttttctggattcatcgactgtggccggctgggtgtggcggaccgctatcaggacatagcgttggctacccgtgatattgctgaagagcttggcggcgaatgggctgaccgcttcctcgtgctttacggtatcgccgctcccgattcgcagcgcatcgccttctatcgccttcttgacgagttcttctgagcgggactctggggttcgaaatgaccgaccaagcgacgcccaacctgccatcacgagatttcgattccaccgccgccttctatgaaaggttgggcttcggaatcgttttccgggacgccggctggatgatcctccagcgcggggatctcatgctggagttcttcgcccaccccaacttgtttattgcagcttataatggttacaaataaagcaatagcatcacaaatttcacaaataaagcatttttttcactgcattctagttgtggtttgtccaaactcatcaatgtatcttatcatgtctgtataccgtcgacctctagctagagcttggcgtaatcatggtcatagctgtttcctgtgtgaaattgttatccgctcacaattccacacaacatacgagccggaagcataaagtgtaaagcctggggtgcctaatgagtgagctaactcacattaattgcgttgcgctcactgcccgctttccagtcgggaaacctgtcgtgccagctgcattaatgaatcggccaacgcgcggggagaggcggtttgcgtattgggcgctcttccgcttcctcgctcactgactcgctgcgctcggtcgttcggctgcggcgagcggtatcagctcactcaaaggcggtaatacggttatccacagaatcaggggataacgcaggaaagaacatgtgagcaaaaggccagcaaaaggccaggaaccgtaaaaaggccgcgttgctggcgtttttccataggctccgcccccctgacgagcatcacaaaaatcgacgctcaagtcagaggtggcgaaacccgacaggactataaagataccaggcgtttccccctggaagctccctcgtgcgctctcctgttccgaccctgccgcttaccggatacctgtccgcctttctcccttcgggaagcgtggcgctttctcatagctcacgctgtaggtatctcagttcggtgtaggtcgttcgctccaagctgggctgtgtgcacgaaccccccgttcagcccgaccgctgcgccttatccggtaactatcgtcttgagtccaacccggtaagacacgacttatcgccactggcagcagccactggtaacaggattagcagagcgaggtatgtaggcggtgctacagagttcttgaagtggtggcctaactacggctacactagaagaacagtatttggtatctgcgctctgctgaagccagttaccttcggaaaaagagttggtagctcttgatccggcaaacaaaccaccgctggtagcggtttttttgtttgcaagcagcagattacgcgcagaaaaaaaggatctcaagaagatcctttgatcttttctacggggtctgacgctcagtggaacgaaaactcacgttaagggattttggtcatgagattatcaaaaaggatcttcacctagatccttttaaattaaaaatgaagttttaaatcaatctaaagtatatatgagtaaacttggtctgacagttaccaatgcttaatcagtgaggcacctatctcagcgatctgtctatttcgttcatccatagttgcctgactccccgtcgtgtagataactacgatacgggagggcttaccatctggccccagtgctgcaatgataccgcgagacccacgctcaccggctccagatttatcagcaataaaccagccagccggaagggccgagcgcagaagtggtcctgcaactttatccgcctccatccagtctattaattgttgccgggaagctagagtaagtagttcgccagttaatagtttgcgcaacgttgttgccattgctacaggcatcgtggtgtcacgctcgtcgtttggtatggcttcattcagctccggttcccaacgatcaaggcgagttacatgatcccccatgttgtgcaaaaaagcggttagctccttcggtcctccgatcgttgtcagaagtaagttggccgcagtgttatcactcatggttatggcagcactgcataattctcttactgtcatgccatccgtaagatgcttttctgtgactggtgagtactcaaccaagtcattctgagaatagtgtatgcggcgaccgagttgctcttgcccggcgtcaatacgggataataccgcgccacatagcagaactttaaaagtgctcatcattggaaaacgttcttcggggcgaaaactctcaaggatcttaccgctgttgagatccagttcgatgtaacccactcgtgcacccaactgatcttcagcatcttttactttcaccagcgtttctgggtgagcaaaaacaggaaggcaaaatgccgcaaaaaagggaataagggcgacacggaaatgttgaatactcatactcttcctttttcaatattattgaagcatttatcagggttattgtctcatgagcggatacatatttgaatgtatttagaaaaataaacaaataggggttccgcgcacatttccccgaaaagtgccacctgacgtc

SEQ ID NO: 110 - DNA, 9266 bp, synthetic construct
  misc_feature 1..9266: note = pMD133_pcDNA3.1_SARS-CoV-2_stablized-S-protein_mut_v3
  source 1..9266: mol_type = other DNA
gacggatcgggagatctcccgatcccctatggtgcactctcagtacaatctgctctgatgccgcatagttaagccagtatctgctccctgcttgtgtgttggaggtcgctgagtagtgcgcgagcaaaatttaagctacaacaaggcaaggcttgaccgacaattgcatgaagaatctgcttagggttaggcgttttgcgctgcttcgcgatgtacgggccagatatacgcgttgacattgattattgactagttattaatagtaatcaattacggggtcattagttcatagcccatatatggagttccgcgttacataacttacggtaaatggcccgcctggctgaccgcccaacgacccccgcccattgacgtcaataatgacgtatgttcccatagtaacgccaatagggactttccattgacgtcaatgggtggagtatttacggtaaactgcccacttggcagtacatcaagtgtatcatatgccaagtacgccccctattgacgtcaatgacggtaaatggcccgcctggcattatgcccagtacatgaccttatgggactttcctacttggcagtacatctacgtattagtcatcgctattaccatggtgatgcggttttggcagtacatcaatgggcgtggatagcggtttgactcacggggatttccaagtctccaccccattgacgtcaatgggagtttgttttggcaccaaaatcaacgggactttccaaaatgtcgtaacaactccgccccattgacgcaaatgggcggtaggcgtgtacggtgggaggtctatataagcagagctctctggctaactagagaacccactgcttactggcttatcgaaattaatacgactcactatagggagacccaagctggatgtttgtgttcctggtgctgctgccactggtgtccagccagtgtgtgaacctgaccaccaggacccaacttcctcctgcctacaccaactccttcaccaggggagtctactaccctgacaaggtgttcaggtcctctgtgctgcacagcacccaggacctgttcctgccattcttcagcaatgtgacctggttccatgccatccatgtgtctggcaccaatggcaccaagaggtttgacaaccctgtgctgccattcaatgatggagtctactttgccagcacagagaagagcaacatcatcaggggctggatttttggcaccaccctggacagcaagacccagtccctgctgattgtgaacaatgccaccaatgtggtgattaaggtgtgtgagttccagttctgtaatgacccattcctgggagtctactaccacaagaacaacaagtcctggatggagtctgagttcagggtctactcctctgccaacaactgtacctttgaatatgtgagccaaccattcctgatggacttggagggcaagcagggcaacttcaagaacctgagggagtttgtgttcaagaacattgatggctacttcaagatttacagcaaacacacaccaatcaacctggtgagggacctgccacagggcttctctgccttggaaccactggtggacctgccaattggcatcaacatcaccaggttccagaccctgctggctctgcacaggtcctacctgacacctggagactcctcctctggctggacagcaggagcagcagcctactatgtgggctacctccaaccaaggaccttcctgctgaaatacaatgagaatggcaccatcacagatgctgagggcaagcagggcaacttcaagaacctgagggagtttgtgttcaagaacattgatggctacttcaagatttacagcaaacacacaccaatcaacctggtgagggacctgccacagggcttctctgccttggaaccactggtggacctgccaattggcatcaacatcaccaggttccagaccctgctggctctgcacaggtcctacctgacacctggagactcctcctctggctggacagcaggagcagcagcctactatgtgggctacctccaaccaaggaccttcctgctgaaatacaatgagaatggcaccatcacagatgctgtggactgtgccctggacccactgtctgagaccaagtgtaccctgaaatccttcacagtggagaagggcatctaccagaccagcaacttcagggtccaaccaacagagagcattgtgaggtttccaaacatcaccaacctgtgtccatttggagaggtgttcaatgccaccaggtttgcctctgtctatgcctggaacaggaagaggattagcaactgtgtggctgactactctgtgctctacaactctgcctccttcagcaccttcaagtgttatggagtgagcccaaccaaactgaatgacctgtgtttcaccaatgtctatgctgactcctttgtgattaggggagatgaggtgagacagattgcccctggacaaacaggcaagattgctgactacaactacaaactgcctgatgacttcacaggctgtgtgattgcctggaacagcaacaacctggacagcaaggtgggaggcaactacaactacctctacagactgttcaggaagagcaacctgaaaccatttgagagggacatcagcacagagatttacgctgctggcagcacaccatgtaatggagtggagggcgccgcttgttactttccactccaatcctatggcttccaaccaaccaatggagtgggctaccaaccatacagggtggtggtgctgtcctttgaactgctccatgcccctgccacagtgtgtggaccaaagaagagcaccaacctggtgaagaacaagtgtgtgaacttcaacttcaatggactgacaggcacaggagtgctgacagagagcaacaagaagttcctgccattccaacagtttggcagggacattgctgacaccacagatgctgtgagggacccacagaccttggagattctggacatcacaccatgttcctttggaggagtgtctgtgattacacctggcaccaacaccagcaaccaggtggctgtgctctaccaggatgtgaactgtactgaggtgcctgtggctatccatgctgaccaacttacaccaacctggagggtctacagcacaggcagcaatgtgttccagaccagggctggctgtctgattggagcagagcatgtgaacaactcctatgagtgtgacatcccaattggagcaggcatctgtgcctcctaccagacccagaccaacagcccaaggagggcaaggtctgtggcaagccagagcatcattgcctacacaatgagtctgggagcagagaactctgtggcttacagcaacaacagcattgccatcccaaccaacttcaccatctctgtgaccacagagattctgcctgtgagtatgaccaagacctctgtggactgtacaatgtatatctgtggagacagcacagagtgtagcaacctgctgctccaatatggctccttctgtacccaacttaacagggctctgacaggcattgctgtggaacaggacaagaacacccaggaggtgtttgcccaggtgaagcagatttacaagacacctccaatcaaggactttggaggcttcaacttcagccagattctgcctgacccaagcaagccaagcaagaggtccttcattgaggacctgctgttcaacaaggtgaccctggctgatgctggcttcatcaagcaatatggagactgtctgggagacattgctgccagggacctgatttgtgcccagaagttcaatggactgacagtgctgcctccactgctgacagatgagatgattgcccaatacacctctgccctgctggctggcaccatcacctctggctggacctttggagcaggagcagccctccaaatcccatttgctatgcagatggcttacaggttcaatggcattggagtgacccagaatgtgctctatgagaaccagaaactgattgccaaccagttcaactctgccattggcaagattcaggactccctgtccagcacagcctctgccctgggcaaactccaagatgtggtgaaccagaatgcccaggctctgaacaccctggtgaagcaactttccagcaactttggagccatctcctctgtgctgaatgacatcctgagcagactggaccctcccgaggctgaggtccagattgacagactgattacaggcagactccaatccctccaaacctatgtgacccaacaacttatcagggctgctgagattagggcatctgccaacctggctgccaccaagatgagtgagtgtgtgctgggacaaagcaagagggtggacttctgtggcaagggctaccacctgatgagttttccacagtctgcccctcatggagtggtgttcctgcatgtgacctatgtgcctgcccaggagaagaacttcaccacagcccctgccatctgccatgatggcaaggctcactttccaagggagggagtgtttgtgagcaatggcacccactggtttgtgacccagaggaacttctatgaaccacagattatcaccacagacaacacctttgtgtctggcaactgtgatgtggtgattggcattgtgaacaacacagtctatgacccactccaacctgaactggactccttcaaggaggaactggacaaatacttcaagaaccacaccagccctgatgtggacctgggagacatctctggcatcaatgcctctgtggtgaacatccagaaggagattgacagactgaatgaggtggctaagaacctgaatgagtccctgattgacctccaagaactgggcaaataagtttaaacccgctgatcagcctcgactgtgccttctagttgccagccatctgttgtttgcccctcccccgtgccttccttgaccctggaaggtgccactcccactgtcctttcctaataaaatgaggaaattgcatcgcattgtctgagtaggtgtcattctattctggggggtggggtggggcaggacagcaagggggaggattgggaagacaatagcaggcatgctggggatgcggtgggctctatggcttctgaggcggaaagaaccagctggggctctagggggtatccccacgcgccctgtagcggcgcattaagcgcggcgggtgtggtggttacgcgcagcgtgaccgctacacttgccagcgccctagcgcccgctcctttcgctttcttcccttcctttctcgccacgttcgccggctttccccgtcaagctctaaatcgggggctccctttagggttccgatttagtgctttacggcacctcgaccccaaaaaacttgattagggtgatggttcacgtagtgggccatcgccctgatagacggtttttcgccctttgacgttggagtccacgttctttaatagtggactcttgttccaaactggaacaacactcaaccctatctcggtctattcttttgatttataagggattttgccgatttcggcctattggttaaaaaatgagctgatttaacaaaaatttaacgcgaattaattctgtggaatgtgtgtcagttagggtgtggaaagtccccaggctccccagcaggcagaagtatgcaaagcatgcatctcaattagtcagcaaccaggtgtggaaagtccccaggctccccagcaggcagaagtatgcaaagcatgcatctcaattagtcagcaaccatagtcccgcccctaactccgcccatcccgcccctaactccgcccagttccgcccattctccgccccatggctgactaattttttttatttatgcagaggccgaggccgcctctgcctctgagctattccagaagtagtgaggaggcttttttggaggcctaggcttttgcaaaaagctcccgggagcttgtatatccattttcggatctgatcaagagacaggatgaggatcgtttcgcatgattgaacaagatggattgcacgcaggttctccggccgcttgggtggagaggctattcggctatgactgggcacaacagacaatcggctgctctgatgccgccgtgttccggctgtcagcgcaggggcgcccggttctttttgtcaagaccgacctgtccggtgccctgaatgaactgcaggacgaggcagcgcggctatcgtggctggccacgacgggcgttccttgcgcagctgtgctcgacgttgtcactgaagcgggaagggactggctgctattgggcgaagtgccggggcaggatctcctgtcatctcaccttgctcctgccgagaaagtatccatcatggctgatgcaatgcggcggctgcatacgcttgatccggctacctgcccattcgaccaccaagcgaaacatcgcatcgagcgagcacgtactcggatggaagccggtcttgtcgatcaggatgatctggacgaagagcatcaggggctcgcgccagccgaactgttcgccaggctcaaggcgcgcatgcccgacggcgaggatctcgtcgtgacccatggcgatgcctgcttgccgaatatcatggtggaaaatggccgcttttctggattcatcgactgtggccggctgggtgtggcggaccgctatcaggacatagcgttggctacccgtgatattgctgaagagcttggcggcgaatgggctgaccgcttcctcgtgctttacggtatcgccgctcccgattcgcagcgcatcgccttctatcgccttcttgacgagttcttctgagcgggactctggggttcgaaatgaccgaccaagcgacgcccaacctgccatcacgagatttcgattccaccgccgccttctatgaaaggttgggcttcggaatcgttttccgggacgccggctggatgatcctccagcgcggggatctcatgctggagttcttcgcccaccccaacttgtttattgcagcttataatggttacaaataaagcaatagcatcacaaatttcacaaataaagcatttttttcactgcattctagttgtggtttgtccaaactcatcaatgtatcttatcatgtctgtataccgtcgacctctagctagagcttggcgtaatcatggtcatagctgtttcctgtgtgaaattgttatccgctcacaattccacacaacatacgagccggaagcataaagtgtaaagcctggggtgcctaatgagtgagctaactcacattaattgcgttgcgctcactgcccgctttccagtcgggaaacctgtcgtgccagctgcattaatgaatcggccaacgcgcggggagaggcggtttgcgtattgggcgctcttccgcttcctcgctcactgactcgctgcgctcggtcgttcggctgcggcgagcggtatcagctcactcaaaggcggtaatacggttatccacagaatcaggggataacgcaggaaagaacatgtgagcaaaaggccagcaaaaggccaggaaccgtaaaaaggccgcgttgctggcgtttttccataggctccgcccccctgacgagcatcacaaaaatcgacgctcaagtcagaggtggcgaaacccgacaggactataaagataccaggcgtttccccctggaagctccctcgtgcgctctcctgttccgaccctgccgcttaccggatacctgtccgcctttctcccttcgggaagcgtggcgctttctcatagctcacgctgtaggtatctcagttcggtgtaggtcgttcgctccaagctgggctgtgtgcacgaaccccccgttcagcccgaccgctgcgccttatccggtaactatcgtcttgagtccaacccggtaagacacgacttatcgccactggcagcagccactggtaacaggattagcagagcgaggtatgtaggcggtgctacagagttcttgaagtggtggcctaactacggctacactagaagaacagtatttggtatctgcgctctgctgaagccagttaccttcggaaaaagagttggtagctcttgatccggcaaacaaaccaccgctggtagcggtttttttgtttgcaagcagcagattacgcgcagaaaaaaaggatctcaagaagatcctttgatcttttctacggggtctgacgctcagtggaacgaaaactcacgttaagggattttggtcatgagattatcaaaaaggatcttcacctagatccttttaaattaaaaatgaagttttaaatcaatctaaagtatatatgagtaaacttggtctgacagttaccaatgcttaatcagtgaggcacctatctcagcgatctgtctatttcgttcatccatagttgcctgactccccgtcgtgtagataactacgatacgggagggcttaccatctggccccagtgctgcaatgataccgcgagacccacgctcaccggctccagatttatcagcaataaaccagccagccggaagggccgagcgcagaagtggtcctgcaactttatccgcctccatccagtctattaattgttgccgggaagctagagtaagtagttcgccagttaatagtttgcgcaacgttgttgccattgctacaggcatcgtggtgtcacgctcgtcgtttggtatggcttcattcagctccggttcccaacgatcaaggcgagttacatgatcccccatgttgtgcaaaaaagcggttagctccttcggtcctccgatcgttgtcagaagtaagttggccgcagtgttatcactcatggttatggcagcactgcataattctcttactgtcatgccatccgtaagatgcttttctgtgactggtgagtactcaaccaagtcattctgagaatagtgtatgcggcgaccgagttgctcttgcccggcgtcaatacgggataataccgcgccacatagcagaactttaaaagtgctcatcattggaaaacgttcttcggggcgaaaactctcaaggatcttaccgctgttgagatccagttcgatgtaacccactcgtgcacccaactgatcttcagcatcttttactttcaccagcgtttctgggtgagcaaaaacaggaaggcaaaatgccgcaaaaaagggaataagggcgacacggaaatgttgaatactcatactcttcctttttcaatattattgaagcatttatcagggttattgtctcatgagcggatacatatttgaatgtatttagaaaaataaacaaataggggttccgcgcacatttccccgaaaagtgccacctgacgtc

SEQ ID NO: 111 - DNA, 9266 bp, synthetic construct
  misc_feature 1..9266: note = pMD134_pcDNA3.1_SARS-CoV-2_stablized-S-protein_mut_v4
  source 1..9266: mol_type = other DNA
gacggatcgggagatctcccgatcccctatggtgcactctcagtacaatctgctctgatgccgcatagttaagccagtatctgctccctgcttgtgtgttggaggtcgctgagtagtgcgcgagcaaaatttaagctacaacaaggcaaggcttgaccgacaattgcatgaagaatctgcttagggttaggcgttttgcgctgcttcgcgatgtacgggccagatatacgcgttgacattgattattgactagttattaatagtaatcaattacggggtcattagttcatagcccatatatggagttccgcgttacataacttacggtaaatggcccgcctggctgaccgcccaacgacccccgcccattgacgtcaataatgacgtatgttcccatagtaacgccaatagggactttccattgacgtcaatgggtggagtatttacggtaaactgcccacttggcagtacatcaagtgtatcatatgccaagtacgccccctattgacgtcaatgacggtaaatggcccgcctggcattatgcccagtacatgaccttatgggactttcctacttggcagtacatctacgtattagtcatcgctattaccatggtgatgcggttttggcagtacatcaatgggcgtggatagcggtttgactcacggggatttccaagtctccaccccattgacgtcaatgggagtttgttttggcaccaaaatcaacgggactttccaaaatgtcgtaacaactccgccccattgacgcaaatgggcggtaggcgtgtacggtgggaggtctatataagcagagctctctggctaactagagaacccactgcttactggcttatcgaaattaatacgactcactatagggagacccaagctggatgtttgtgttcctggtgctgctgccactggtgtccagccagtgtgtgaacctgaccaccaggacccaacttcctcctgcctacaccaactccttcaccaggggagtctactaccctgacaaggtgttcaggtcctctgtgctgcacagcacccaggacctgttcctgccattcttcagcaatgtgacctggttccatgccatccatgtgtctggcaccaatggcaccaagaggtttgacaaccctgtgctgccattcaatgatggagtctactttgccagcacagagaagagcaacatcatcaggggctggatttttggcaccaccctggacagcaagacccagtccctgctgattgtgaacaatgccaccaatgtggtgattaaggtgtgtgagttccagttctgtaatgacccattcctgggagtctactaccacaagaacaacaagtcctggatggagtctgagttcagggtctactcctctgccaacaactgtacctttgaatatgtgagccaaccattcctgatggacttggagggcaagcagggcaacttcaagaacctgagggagtttgtgttcaagaacattgatggctacttcaagatttacagcaaacacacaccaatcaacctggtgagggacctgccacagggcttctctgccttggaaccactggtggacctgccaattggcatcaacatcaccaggttccagaccctgctggctctgcacaggtcctacctgacacctggagactcctcctctggctggacagcaggagcagcagcctactatgtgggctacctccaaccaaggaccttcctgctgaaatacaatgagaatggcaccatcacagatgctgagggcaagcagggcaacttcaagaacctgagggagtttgtgttcaagaacattgatggctacttcaagatttacagcaaacacacaccaatcaacctggtgagggacctgccacagggcttctctgccttggaaccactggtggacctgccaattggcatcaacatcaccaggttccagaccctgctggctctgcacaggtcctacctgacacctggagactcctcctctggctggacagcaggagcagcagcctactatgtgggctacctccaaccaaggaccttcctgctgaaatacaatgagaatggcaccatcacagatgctgtggactgtgccctggacccactgtctgagaccaagtgtaccctgaaatccttcacagtggagaagggcatctaccagaccagcaacttcagggtccaaccaacagagagcattgtgaggtttccaaacatcaccaacctgtgtccatttggagaggtgttcaatgccaccaggtttgcctctgtctatgcctggaacaggaagaggattagcaactgtgtggctgactactctgtgctctacaactctgcctccttcagcaccttcaagtgttatggagtgagcccaaccaaactgaatgacctgtgtttcaccaatgtctatgctgactcctttgtgattaggggagatgaggtgagacagattgcccctggacaaacaggcgccattgctgactacaactacaaactgcctgatgacttcacaggctgtgtgattgcctggaacagcgccaacctggacagcaaggtgggaggcaacgccaactacctctacagagccgctaggaagagcaacctgaaaccatttgagagggacatcagcacagagattgccgctgctggcagcacaccatgtaatggagtggagggcgccgcttgttactttccactcgcctcctatggcttcgccccagctgccggagtgggctaccaaccatacagggtggtggtgctgtcctttgaactgctccatgcccctgccacagtgtgtggaccaaagaagagcaccaacctggtgaagaacaagtgtgtgaacttcaacgccaatggactgacaggcacaggagtgctgacagagagcaacaagaagttcctgccattccaacagtttggcagggacattgctgacaccacagatgctgtgagggacccacagaccttggagattctggacatcacaccatgttcctttggaggagtgtctgtgattacacctggcaccaacaccagcaaccaggtggctgtgctctaccaggatgtgaactgtactgaggtgcctgtggctatccatgctgaccaacttacaccaacctggagggtctacagcacaggcagcaatgtgttccagaccagggctggctgtctgattggagcagagcatgtgaacaactcctatgagtgtgacatcccaattggagcaggcatctgtgcctcctaccagacccagaccaacagcccaaggagggcaaggtctgtggcaagccagagcatcattgcctacacaatgagtctgggagcagagaactctgtggcttacagcaacaacagcattgccatcccaaccaacttcaccatctctgtgaccacagagattctgcctgtgagtatgaccaagacctctgtggactgtacaatgtatatctgtggagacagcacagagtgtagcaacctgctgctccaatatggctccttctgtacccaacttaacagggctctgacaggcattgctgtggaacaggacaagaacacccaggaggtgtttgcccaggtgaagcagatttacaagacacctccaatcaaggactttggaggcttcaacttcagccagattctgcctgacccaagcaagccaagcaagaggtccttcattgaggacctgctgttcaacaaggtgaccctggctgatgctggcttcatcaagcaatatggagactgtctgggagacattgctgccagggacctgatttgtgcccagaagttcaatggactgacagtgctgcctccactgctgacagatgagatgattgcccaatacacctctgccctgctggctggcaccatcacctctggctggacctttggagcaggagcagccctccaaatcccatttgctatgcagatggcttacaggttcaatggcattggagtgacccagaatgtgctctatgagaaccagaaactgattgccaaccagttcaactctgccattggcaagattcaggactccctgtccagcacagcctctgccctgggcaaactccaagatgtggtgaaccagaatgcccaggctctgaacaccctggtgaagcaactttccagcaactttggagccatctcctctgtgctgaatgacatcctgagcagactggaccctcccgaggctgaggtccagattgacagactgattacaggcagactccaatccctccaaacctatgtgacccaacaacttatcagggctgctgagattagggcatctgccaacctggctgccaccaagatgagtgagtgtgtgctgggacaaagcaagagggtggacttctgtggcaagggctaccacctgatgagttttccacagtctgcccctcatggagtggtgttcctgcatgtgacctatgtgcctgcccaggagaagaacttcaccacagcccctgccatctgccatgatggcaaggctcactttccaagggagggagtgtttgtgagcaatggcacccactggtttgtgacccagaggaacttctatgaaccacagattatcaccacagacaacacctttgtgtctggcaactgtgatgtggtgattggcattgtgaacaacacagtctatgacccactccaacctgaactggactccttcaaggaggaactggacaaatacttcaagaaccacaccagccctgatgtggacctgggagacatctctggcatcaatgcctctgtggtgaacatccagaaggagattgacagactgaatgaggtggctaagaacctgaatgagtccctgattgacctccaagaactgggcaaataagtttaaacccgctgatcagcctcgactgtgccttctagttgccagccatctgttgtttgcccctcccccgtgccttccttgaccctggaaggtgccactcccactgtcctttcctaataaaatgaggaaattgcatcgcattgtctgagtaggtgtcattctattctggggggtggggtggggcaggacagcaagggggaggattgggaagacaatagcaggcatgctggggatgcggtgggctctatggcttctgaggcggaaagaaccagctggggctctagggggtatccccacgcgccctgtagcggcgcattaagcgcggcgggtgtggtggttacgcgcagcgtgaccgctacacttgccagcgccctagcgcccgctcctttcgctttcttcccttcctttctcgccacgttcgccggctttccccgtcaagctctaaatcgggggctccctttagggttccgatttagtgctttacggcacctcgaccccaaaaaacttgattagggtgatggttcacgtagtgggccatcgccctgatagacggtttttcgccctttgacgttggagtccacgttctttaatagtggactcttgttccaaactggaacaacactcaaccctatctcggtctattcttttgatttataagggattttgccgatttcggcctattggttaaaaaatgagctgatttaacaaaaatttaacgcgaattaattctgtggaatgtgtgtcagttagggtgtggaaagtccccaggctccccagcaggcagaagtatgcaaagcatgcatctcaattagtcagcaaccaggtgtggaaagtccccaggctccccagcaggcagaagtatgcaaagcatgcatctcaattagtcagcaaccatagtcccgcccctaactccgcccatcccgcccctaactccgcccagttccgcccattctccgccccatggctgactaattttttttatttatgcagaggccgaggccgcctctgcctctgagctattccagaagtagtgaggaggcttttttggaggcctaggcttttgcaaaaagctcccgggagcttgtatatccattttcggatctgatcaagagacaggatgaggatcgtttcgcatgattgaacaagatggattgcacgcaggttctccggccgcttgggtggagaggctattcggctatgactgggcacaacagacaatcggctgctctgatgccgccgtgttccggctgtcagcgcaggggcgcccggttctttttgtcaagaccgacctgtccggtgccctgaatgaactgcaggacgaggcagcgcggctatcgtggctggccacgacgggcgttccttgcgcagctgtgctcgacgttgtcactgaagcgggaagggactggctgctattgggcgaagtgccggggcaggatctcctgtcatctcaccttgctcctgccgagaaagtatccatcatggctgatgcaatgcggcggctgcatacgcttgatccggctacctgcccattcgaccaccaagcgaaacatcgcatcgagcgagcacgtactcggatggaagccggtcttgtcgatcaggatgatctggacgaagagcatcaggggctcgcgccagccgaactgttcgccaggctcaaggcgcgcatgcccgacggcgaggatctcgtcgtgacccatggcgatgcctgcttgccgaatatcatggtggaaaatggccgcttttctggattcatcgactgtggccggctgggtgtggcggaccgctatcaggacatagcgttggctacccgtgatattgctgaagagcttggcggcgaatgggctgaccgcttcctcgtgctttacggtatcgccgctcccgattcgcagcgcatcgccttctatcgccttcttgacgagttcttctgagcgggactctggggttcgaaatgaccgaccaagcgacgcccaacctgccatcacgagatttcgattccaccgccgccttctatgaaaggttgggcttcggaatcgttttccgggacgccggctggatgatcctccagcgcggggatctcatgctggagttcttcgcccaccccaacttgtttattgcagcttataatggttacaaataaagcaatagcatcacaaatttcacaaataaagcatttttttcactgcattctagttgtggtttgtccaaactcatcaatgtatcttatcatgtctgtataccgtcgacctctagctagagcttggcgtaatcatggtcatagctgtttcctgtgtgaaattgttatccgctcacaattccacacaacatacgagccggaagcataaagtgtaaagcctggggtgcctaatgagtgagctaactcacattaattgcgttgcgctcactgcccgctttccagtcgggaaacctgtcgtgccagctgcattaatgaatcggccaacgcgcggggagaggcggtttgcgtattgggcgctcttccgcttcctcgctcactgactcgctgcgctcggtcgttcggctgcggcgagcggtatcagctcactcaaaggcggtaatacggttatccacagaatcaggggataacgcaggaaagaacatgtgagcaaaaggccagcaaaaggccaggaaccgtaaaaaggccgcgttgctggcgtttttccataggctccgcccccctgacgagcatcacaaaaatcgacgctcaagtcagaggtggcgaaacccgacaggactataaagataccaggcgtttccccctggaagctccctcgtgcgctctcctgttccgaccctgccgcttaccggatacctgtccgcctttctcccttcgggaagcgtggcgctttctcatagctcacgctgtaggtatctcagttcggtgtaggtcgttcgctccaagctgggctgtgtgcacgaaccccccgttcagcccgaccgctgcgccttatccggtaactatcgtcttgagtccaacccggtaagacacgacttatcgccactggcagcagccactggtaacaggattagcagagcgaggtatgtaggcggtgctacagagttcttgaagtggtggcctaactacggctacactagaagaacagtatttggtatctgcgctctgctgaagccagttaccttcggaaaaagagttggtagctcttgatccggcaaacaaaccaccgctggtagcggtttttttgtttgcaagcagcagattacgcgcagaaaaaaaggatctcaagaagatcctttgatcttttctacggggtctgacgctcagtggaacgaaaactcacgttaagggattttggtcatgagattatcaaaaaggatcttcacctagatccttttaaattaaaaatgaagttttaaatcaatctaaagtatatatgagtaaacttggtctgacagttaccaatgcttaatcagtgaggcacctatctcagcgatctgtctatttcgttcatccatagttgcctgactccccgtcgtgtagataactacgatacgggagggcttaccatctggccccagtgctgcaatgataccgcgagacccacgctcaccggctccagatttatcagcaataaaccagccagccggaagggccgagcgcagaagtggtcctgcaactttatccgcctccatccagtctattaattgttgccgggaagctagagtaagtagttcgccagttaatagtttgcgcaacgttgttgccattgctacaggcatcgtggtgtcacgctcgtcgtttggtatggcttcattcagctccggttcccaacgatcaaggcgagttacatgatcccccatgttgtgcaaaaaagcggttagctccttcggtcctccgatcgttgtcagaagtaagttggccgcagtgttatcactcatggttatggcagcactgcataattctcttactgtcatgccatccgtaagatgcttttctgtgactggtgagtactcaaccaagtcattctgagaatagtgtatgcggcgaccgagttgctcttgcccggcgtcaatacgggataataccgcgccacatagcagaactttaaaagtgctcatcattggaaaacgttcttcggggcgaaaactctcaaggatcttaccgctgttgagatccagttcgatgtaacccactcgtgcacccaactgatcttcagcatcttttactttcaccagcgtttctgggtgagcaaaaacaggaaggcaaaatgccgcaaaaaagggaataagggcgacacggaaatgttgaatactcatactcttcctttttcaatattattgaagcatttatcagggttattgtctcatgagcggatacatatttgaatgtatttagaaaaataaacaaataggggttccgcgcacatttccccgaaaagtgccacctgacgtc

SEQ ID NO: 112 - DNA, 8939 bp, synthetic construct
  misc_feature 1..8939: note = pMD135_pcDNA3.1_SARS-CoV-2_stablized-S-protein
  source 1..8939: mol_type = other DNA
gacggatcgggagatctcccgatcccctatggtgcactctcagtacaatctgctctgatgccgcatagttaagccagtatctgctccctgcttgtgtgttggaggtcgctgagtagtgcgcgagcaaaatttaagctacaacaaggcaaggcttgaccgacaattgcatgaagaatctgcttagggttaggcgttttgcgctgcttcgcgatgtacgggccagatatacgcgttgacattgattattgactagttattaatagtaatcaattacggggtcattagttcatagcccatatatggagttccgcgttacataacttacggtaaatggcccgcctggctgaccgcccaacgacccccgcccattgacgtcaataatgacgtatgttcccatagtaacgccaatagggactttccattgacgtcaatgggtggagtatttacggtaaactgcccacttggcagtacatcaagtgtatcatatgccaagtacgccccctattgacgtcaatgacggtaaatggcccgcctggcattatgcccagtacatgaccttatgggactttcctacttggcagtacatctacgtattagtcatcgctattaccatggtgatgcggttttggcagtacatcaatgggcgtggatagcggtttgactcacggggatttccaagtctccaccccattgacgtcaatgggagtttgttttggcaccaaaatcaacgggactttccaaaatgtcgtaacaactccgccccattgacgcaaatgggcggtaggcgtgtacggtgggaggtctatataagcagagctctctggctaactagagaacccactgcttactggcttatcgaaattaatacgactcactatagggagacccaagctggatgtttgtgttcctggtgctgctgccactggtgtccagccagtgtgtgaacctgaccaccaggacccaacttcctcctgcctacaccaactccttcaccaggggagtctactaccctgacaaggtgttcaggtcctctgtgctgcacagcacccaggacctgttcctgccattcttcagcaatgtgacctggttccatgccatccatgtgtctggcaccaatggcaccaagaggtttgacaaccctgtgctgccattcaatgatggagtctactttgccagcacagagaagagcaacatcatcaggggctggatttttggcaccaccctggacagcaagacccagtccctgctgattgtgaacaatgccaccaatgtggtgattaaggtgtgtgagttccagttctgtaatgacccattcctgggagtctactaccacaagaacaacaagtcctggatggagtctgagttcagggtctactcctctgccaacaactgtacctttgaatatgtgagccaaccattcctgatggacttggagggcaagcagggcaacttcaagaacctgagggagtttgtgttcaagaacattgatggctacttcaagatttacagcaaacacacaccaatcaacctggtgagggacctgccacagggcttctctgccttggaaccactggtggacctgccaattggcatcaacatcaccaggttccagaccctgctggctctgcacaggtcctacctgacacctggagactcctcctctggctggacagcaggagcagcagcctactatgtgggctacctccaaccaaggaccttcctgctgaaatacaatgagaatggcaccatcacagatgctgtggactgtgccctggacccactgtctgagaccaagtgtaccctgaaatccttcacagtggagaagggcatctaccagaccagcaacttcagggtccaaccaacagagagcattgtgaggtttccaaacatcaccaacctgtgtccatttggagaggtgttcaatgccaccaggtttgcctctgtctatgcctggaacaggaagaggattagcaactgtgtggctgactactctgtgctctacaactctgcctccttcagcaccttcaagtgttatggagtgagcccaaccaaactgaatgacctgtgtttcaccaatgtctatgctgactcctttgtgattaggggagatgaggtgagacagattgcccctggacaaacaggcaagattgctgactacaactacaaactgcctgatgacttcacaggctgtgtgattgcctggaacagcaacaacctggacagcaaggtgggaggcaactacaactacctctacagactgttcaggaagagcaacctgaaaccatttgagagggacatcagcacagagatttaccaggctggcagcacaccatgtaatggagtggagggcttcaactgttactttccactccaatcctatggcttccaaccaaccaatggagtgggctaccaaccatacagggtggtggtgctgtcctttgaactgctccatgcccctgccacagtgtgtggaccaaagaagagcaccaacctggtgaagaacaagtgtgtgaacttcaacttcaatggactgacaggcacaggagtgctgacagagagcaacaagaagttcctgccattccaacagtttggcagggacattgctgacaccacagatgctgtgagggacccacagaccttggagattctggacatcacaccatgttcctttggaggagtgtctgtgattacacctggcaccaacaccagcaaccaggtggctgtgctctaccaggatgtgaactgtactgaggtgcctgtggctatccatgctgaccaacttacaccaacctggagggtctacagcacaggcagcaatgtgttccagaccagggctggctgtctgattggagcagagcatgtgaacaactcctatgagtgtgacatcccaattggagcaggcatctgtgcctcctaccagacccagaccaacagcccaaggagggcaaggtctgtggcaagccagagcatcattgcctacacaatgagtctgggagcagagaactctgtggcttacagcaacaacagcattgccatcccaaccaacttcaccatctctgtgaccacagagattctgcctgtgagtatgaccaagacctctgtggactgtacaatgtatatctgtggagacagcacagagtgtagcaacctgctgctccaatatggctccttctgtacccaacttaacagggctctgacaggcattgctgtggaacaggacaagaacacccaggaggtgtttgcccaggtgaagcagatttacaagacacctccaatcaaggactttggaggcttcaacttcagccagattctgcctgacccaagcaagccaagcaagaggtccttcattgaggacctgctgttcaacaaggtgaccctggctgatgctggcttcatcaagcaatatggagactgtctgggagacattgctgccagggacctgatttgtgcccagaagttcaatggactgacagtgctgcctccactgctgacagatgagatgattgcccaatacacctctgccctgctggctggcaccatcacctctggctggacctttggagcaggagcagccctccaaatcccatttgctatgcagatggcttacaggttcaatggcattggagtgacccagaatgtgctctatgagaaccagaaactgattgccaaccagttcaactctgccattggcaagattcaggactccctgtccagcacagcctctgccctgggcaaactccaagatgtggtgaaccagaatgcccaggctctgaacaccctggtgaagcaactttccagcaactttggagccatctcctctgtgctgaatgacatcctgagcagactggaccctcccgaggctgaggtccagattgacagactgattacaggcagactccaatccctccaaacctatgtgacccaacaacttatcagggctgctgagattagggcatctgccaacctggctgccaccaagatgagtgagtgtgtgctgggacaaagcaagagggtggacttctgtggcaagggctaccacctgatgagttttccacagtctgcccctcatggagtggtgttcctgcatgtgacctatgtgcctgcccaggagaagaacttcaccacagcccctgccatctgccatgatggcaaggctcactttccaagggagggagtgtttgtgagcaatggcacccactggtttgtgacccagaggaacttctatgaaccacagattatcaccacagacaacacctttgtgtctggcaactgtgatgtggtgattggcattgtgaacaacacagtctatgacccactccaacctgaactggactccttcaaggaggaactggacaaatacttcaagaaccacaccagccctgatgtggacctgggagacatctctggcatcaatgcctctgtggtgaacatccagaaggagattgacagactgaatgaggtggctaagaacctgaatgagtccctgattgacctccaagaactgggcaaataagtttaaacccgctgatcagcctcgactgtgccttctagttgccagccatctgttgtttgcccctcccccgtgccttccttgaccctggaaggtgccactcccactgtcctttcctaataaaatgaggaaattgcatcgcattgtctgagtaggtgtcattctattctggggggtggggtggggcaggacagcaagggggaggattgggaagacaatagcaggcatgctggggatgcggtgggctctatggcttctgaggcggaaagaaccagctggggctctagggggtatccccacgcgccctgtagcggcgcattaagcgcggcgggtgtggtggttacgcgcagcgtgaccgctacacttgccagcgccctagcgcccgctcctttcgctttcttcccttcctttctcgccacgttcgccggctttccccgtcaagctctaaatcgggggctccctttagggttccgatttagtgctttacggcacctcgaccccaaaaaacttgattagggtgatggttcacgtagtgggccatcgccctgatagacggtttttcgccctttgacgttggagtccacgttctttaatagtggactcttgttccaaactggaacaacactcaaccctatctcggtctattcttttgatttataagggattttgccgatttcggcctattggttaaaaaatgagctgatttaacaaaaatttaacgcgaattaattctgtggaatgtgtgtcagttagggtgtggaaagtccccaggctccccagcaggcagaagtatgcaaagcatgcatctcaattagtcagcaaccaggtgtggaaagtccccaggctccccagcaggcagaagtatgcaaagcatgcatctcaattagtcagcaaccatagtcccgcccctaactccgcccatcccgcccctaactccgcccagttccgcccattctccgccccatggctgactaattttttttatttatgcagaggccgaggccgcctctgcctctgagctattccagaagtagtgaggaggcttttttggaggcctaggcttttgcaaaaagctcccgggagcttgtatatccattttcggatctgatcaagagacaggatgaggatcgtttcgcatgattgaacaagatggattgcacgcaggttctccggccgcttgggtggagaggctattcggctatgactgggcacaacagacaatcggctgctctgatgccgccgtgttccggctgtcagcgcaggggcgcccggttctttttgtcaagaccgacctgtccggtgccctgaatgaactgcaggacgaggcagcgcggctatcgtggctggccacgacgggcgttccttgcgcagctgtgctcgacgttgtcactgaagcgggaagggactggctgctattgggcgaagtgccggggcaggatctcctgtcatctcaccttgctcctgccgagaaagtatccatcatggctgatgcaatgcggcggctgcatacgcttgatccggctacctgcccattcgaccaccaagcgaaacatcgcatcgagcgagcacgtactcggatggaagccggtcttgtcgatcaggatgatctggacgaagagcatcaggggctcgcgccagccgaactgttcgccaggctcaaggcgcgcatgcccgacggcgaggatctcgtcgtgacccatggcgatgcctgcttgccgaatatcatggtggaaaatggccgcttttctggattcatcgactgtggccggctgggtgtggcggaccgctatcaggacatagcgttggctacccgtgatattgctgaagagcttggcggcgaatgggctgaccgcttcctcgtgctttacggtatcgccgctcccgattcgcagcgcatcgccttctatcgccttcttgacgagttcttctgagcgggactctggggttcgaaatgaccgaccaagcgacgcccaacctgccatcacgagatttcgattccaccgccgccttctatgaaaggttgggcttcggaatcgttttccgggacgccggctggatgatcctccagcgcggggatctcatgctggagttcttcgcccaccccaacttgtttattgcagcttataatggttacaaataaagcaatagcatcacaaatttcacaaataaagcatttttttcactgcattctagttgtggtttgtccaaactcatcaatgtatcttatcatgtctgtataccgtcgacctctagctagagcttggcgtaatcatggtcatagctgtttcctgtgtgaaattgttatccgctcacaattccacacaacatacgagccggaagcataaagtgtaaagcctggggtgcctaatgagtgagctaactcacattaattgcgttgcgctcactgcccgctttccagtcgggaaacctgtcgtgccagctgcattaatgaatcggccaacgcgcggggagaggcggtttgcgtattgggcgctcttccgcttcctcgctcactgactcgctgcgctcggtcgttcggctgcggcgagcggtatcagctcactcaaaggcggtaatacggttatccacagaatcaggggataacgcaggaaagaacatgtgagcaaaaggccagcaaaaggccaggaaccgtaaaaaggccgcgttgctggcgtttttccataggctccgcccccctgacgagcatcacaaaaatcgacgctcaagtcagaggtggcgaaacccgacaggactataaagataccaggcgtttccccctggaagctccctcgtgcgctctcctgttccgaccctgccgcttaccggatacctgtccgcctttctcccttcgggaagcgtggcgctttctcatagctcacgctgtaggtatctcagttcggtgtaggtcgttcgctccaagctgggctgtgtgcacgaaccccccgttcagcccgaccgctgcgccttatccggtaactatcgtcttgagtccaacccggtaagacacgacttatcgccactggcagcagccactggtaacaggattagcagagcgaggtatgtaggcggtgctacagagttcttgaagtggtggcctaactacggctacactagaagaacagtatttggtatctgcgctctgctgaagccagttaccttcggaaaaagagttggtagctcttgatccggcaaacaaaccaccgctggtagcggtttttttgtttgcaagcagcagattacgcgcagaaaaaaaggatctcaagaagatcctttgatcttttctacggggtctgacgctcagtggaacgaaaactcacgttaagggattttggtcatgagattatcaaaaaggatcttcacctagatccttttaaattaaaaatgaagttttaaatcaatctaaagtatatatgagtaaacttggtctgacagttaccaatgcttaatcagtgaggcacctatctcagcgatctgtctatttcgttcatccatagttgcctgactccccgtcgtgtagataactacgatacgggagggcttaccatctggccccagtgctgcaatgataccgcgagacccacgctcaccggctccagatttatcagcaataaaccagccagccggaagggccgagcgcagaagtggtcctgcaactttatccgcctccatccagtctattaattgttgccgggaagctagagtaagtagttcgccagttaatagtttgcgcaacgttgttgccattgctacaggcatcgtggtgtcacgctcgtcgtttggtatggcttcattcagctccggttcccaacgatcaaggcgagttacatgatcccccatgttgtgcaaaaaagcggttagctccttcggtcctccgatcgttgtcagaagtaagttggccgcagtgttatcactcatggttatggcagcactgcataattctcttactgtcatgccatccgtaagatgcttttctgtgactggtgagtactcaaccaagtcattctgagaatagtgtatgcggcgaccgagttgctcttgcccggcgtcaatacgggataataccgcgccacatagcagaactttaaaagtgctcatcattggaaaacgttcttcggggcgaaaactctcaaggatcttaccgctgttgagatccagttcgatgtaacccactcgtgcacccaactgatcttcagcatcttttactttcaccagcgtttctgggtgagcaaaaacaggaaggcaaaatgccgcaaaaaagggaataagggcgacacggaaatgttgaatactcatactcttcctttttcaatattattgaagcatttatcagggttattgtctcatgagcggatacatatttgaatgtatttagaaaaataaacaaataggggttccgcgcacatttccccgaaaagtgccacctgacgtc

SEQ ID NO: 113 - DNA, 10202 bp, synthetic construct
  misc_feature 1..10202: note pMD136-pcDNA3.1-SARS2-GGSG-foldon-G-6xHis-streptavidin-T2A- mScarlet
  source 1..10202: mol_type = other DNA
gacggatcgggagatctcccgatcccctatggtgcactctcagtacaatctgctctgatgccgcatagttaagccagtatctgctccctgcttgtgtgttggaggtcgctgagtagtgcgcgagcaaaatttaagctacaacaaggcaaggcttgaccgacaattgcatgaagaatctgcttagggttaggcgttttgcgctgcttcgcgatgtacgggccagatatacgcgttgacattgattattgactagttattaatagtaatcaattacggggtcattagttcatagcccatatatggagttccgcgttacataacttacggtaaatggcccgcctggctgaccgcccaacgacccccgcccattgacgtcaataatgacgtatgttcccatagtaacgccaatagggactttccattgacgtcaatgggtggagtatttacggtaaactgcccacttggcagtacatcaagtgtatcatatgccaagtacgccccctattgacgtcaatgacggtaaatggcccgcctggcattatgcccagtacatgaccttatgggactttcctacttggcagtacatctacgtattagtcatcgctattaccatggtgatgcggttttggcagtacatcaatgggcgtggatagcggtttgactcacggggatttccaagtctccaccccattgacgtcaatgggagtttgttttggcaccaaaatcaacgggactttccaaaatgtcgtaacaactccgccccattgacgcaaatgggcggtaggcgtgtacggtgggaggtctatataagcagagctctctggctaactagagaacccactgcttactggcttatcgaaattaatacgactcactatagggagacccaagctggatgtttgtgttcctggtgctgctgccactggtgtccagccagtgtgtgaacctgaccaccaggacccaacttcctcctgcctacaccaactccttcaccaggggagtctactaccctgacaaggtgttcaggtcctctgtgctgcacagcacccaggacctgttcctgccattcttcagcaatgtgacctggttccatgccatccatgtgtctggcaccaatggcaccaagaggtttgacaaccctgtgctgccattcaatgatggagtctactttgccagcacagagaagagcaacatcatcaggggctggatttttggcaccaccctggacagcaagacccagtccctgctgattgtgaacaatgccaccaatgtggtgattaaggtgtgtgagttccagttctgtaatgacccattcctgggagtctactaccacaagaacaacaagtcctggatggagtctgagttcagggtctactcctctgccaacaactgtacctttgaatatgtgagccaaccattcctgatggacttggagggcaagcagggcaacttcaagaacctgagggagtttgtgttcaagaacattgatggctacttcaagatttacagcaaacacacaccaatcaacctggtgagggacctgccacagggcttctctgccttggaaccactggtggacctgccaattggcatcaacatcaccaggttccagaccctgctggctctgcacaggtcctacctgacacctggagactcctcctctggctggacagcaggagcagcagcctactatgtgggctacctccaaccaaggaccttcctgctgaaatacaatgagaatggcaccatcacagatgctgtggactgtgccctggacccactgtctgagaccaagtgtaccctgaaatccttcacagtggagaagggcatctaccagaccagcaacttcagggtccaaccaacagagagcattgtgaggtttccaaacatcaccaacctgtgtccatttggagaggtgttcaatgccaccaggtttgcctctgtctatgcctggaacaggaagaggattagcaactgtgtggctgactactctgtgctctacaactctgcctccttcagcaccttcaagtgttatggagtgagcccaaccaaactgaatgacctgtgtttcaccaatgtctatgctgactcctttgtgattaggggagatgaggtgagacagattgcccctggacaaacaggcaagattgctgactacaactacaaactgcctgatgacttcacaggctgtgtgattgcctggaacagcaacaacctggacagcaaggtgggaggcaactacaactacctctacagactgttcaggaagagcaacctgaaaccatttgagagggacatcagcacagagatttaccaggctggcagcacaccatgtaatggagtggagggcttcaactgttactttccactccaatcctatggcttccaaccaaccaatggagtgggctaccaaccatacagggtggtggtgctgtcctttgaactgctccatgcccctgccacagtgtgtggaccaaagaagagcaccaacctggtgaagaacaagtgtgtgaacttcaacttcaatggactgacaggcacaggagtgctgacagagagcaacaagaagttcctgccattccaacagtttggcagggacattgctgacaccacagatgctgtgagggacccacagaccttggagattctggacatcacaccatgttcctttggaggagtgtctgtgattacacctggcaccaacaccagcaaccaggtggctgtgctctaccaggatgtgaactgtactgaggtgcctgtggctatccatgctgaccaacttacaccaacctggagggtctacagcacaggcagcaatgtgttccagaccagggctggctgtctgattggagcagagcatgtgaacaactcctatgagtgtgacatcccaattggagcaggcatctgtgcctcctaccagacccagaccaacagcccaaggagggcaaggtctgtggcaagccagagcatcattgcctacacaatgagtctgggagcagagaactctgtggcttacagcaacaacagcattgccatcccaaccaacttcaccatctctgtgaccacagagattctgcctgtgagtatgaccaagacctctgtggactgtacaatgtatatctgtggagacagcacagagtgtagcaacctgctgctccaatatggctccttctgtacccaacttaacagggctctgacaggcattgctgtggaacaggacaagaacacccaggaggtgtttgcccaggtgaagcagatttacaagacacctccaatcaaggactttggaggcttcaacttcagccagattctgcctgacccaagcaagccaagcaagaggtccttcattgaggacctgctgttcaacaaggtgaccctggctgatgctggcttcatcaagcaatatggagactgtctgggagacattgctgccagggacctgatttgtgcccagaagttcaatggactgacagtgctgcctccactgctgacagatgagatgattgcccaatacacctctgccctgctggctggcaccatcacctctggctggacctttggagcaggagcagccctccaaatcccatttgctatgcagatggcttacaggttcaatggcattggagtgacccagaatgtgctctatgagaaccagaaactgattgccaaccagttcaactctgccattggcaagattcaggactccctgtccagcacagcctctgccctgggcaaactccaagatgtggtgaaccagaatgcccaggctctgaacaccctggtgaagcaactttccagcaactttggagccatctcctctgtgctgaatgacatcctgagcagactggaccctcccgaggctgaggtccagattgacagactgattacaggcagactccaatccctccaaacctatgtgacccaacaacttatcagggctgctgagattagggcatctgccaacctggctgccaccaagatgagtgagtgtgtgctgggacaaagcaagagggtggacttctgtggcaagggctaccacctgatgagttttccacagtctgcccctcatggagtggtgttcctgcatgtgacctatgtgcctgcccaggagaagaacttcaccacagcccctgccatctgccatgatggcaaggctcactttccaagggagggagtgtttgtgagcaatggcacccactggtttgtgacccagaggaacttctatgaaccacagattatcaccacagacaacacctttgtgtctggcaactgtgatgtggtgattggcattgtgaacaacacagtctatgacccactccaacctgaactggactccttcaaggaggaactggacaaatacttcaagaaccacaccagccctgatgtggacctgggagacatctctggcatcaatgcctctgtggtgaacatccagaaggagattgacagactgaatgaggtggctaagaacctgaatgagtccctgattgacctccaagaactgggcaaaggcggaggcagcgggtatattccggaggctccaagagacggtcaggcgtacgtacggaaggacggcgaatgggttctcttgagcactttcttaggccatcatcatcaccaccatatggcggaagctggcattacggggacctggtacaaccaacttggttcaacattcattgtgactgcgggagccgacggagccctcacgggcacctatgagtccgccgttggcaatgcggagtctcgctatgtcctgacaggtagatatgacagcgcaccggctacggacggaagtggtactgctctcggttggaccgtggcctggaaaaacaattataggaacgcacatagcgcgacgacctggagtggacaatatgtcggcggcgctgaagccaggataaacacccaatggcttctcacctccggaacaactgaagcaaacgcgtggaaaagcactcttgtaggccacgacacgttcacgaaggtaaagccgagcgccgcatcctatgaacaaggcagtggagagggcagaggaagtctgctaacatgcggtgacgtcgaggagaatcctggcccaatgagtaaaggagaagctgtgattaaagagttcatgcgcttcaaagttcacatggagggttctatgaacggtcacgagttcgagatcgaaggcgaaggcgagggccgtccgtatgaaggcacccagaccgccaaactgaaagtgactaaaggcggcccgctgcctttttcctgggacatcctgagcccgcaatttatgtacggttctagggcgttcaccaaacacccagcggatatcccggactattataagcagtcttttccggaaggtttcaagtgggaacgcgtaatgaattttgaagatggtggtgccgtgaccgtcactcaggacacctccctggaggatggcaccctgatctataaagttaaactgcgtggtactaattttccacctgatggcccggtgatgcagaaaaagacgatgggttgggaggcgtctaccgaacgcttgtatccggaagatggtgtgctgaaaggcgacattaaaatggccctgcgcctgaaagatggcggccgctatctggctgacttcaaaaccacgtacaaagccaagaaacctgtgcagatgcctggcgcgtacaatgtggaccgcaaactggacatcacctctcataatgaagattatacggtggtagagcaatatgagcgctccgagggtcgtcattctaccggtggcatggatgaactatacaaataagtttaaacccgctgatcagcctcgactgtgccttctagttgccagccatctgttgtttgcccctcccccgtgccttccttgaccctggaaggtgccactcccactgtcctttcctaataaaatgaggaaattgcatcgcattgtctgagtaggtgtcattctattctggggggtggggtggggcaggacagcaagggggaggattgggaagacaatagcaggcatgctggggatgcggtgggctctatggcttctgaggcggaaagaaccagctggggctctagggggtatccccacgcgccctgtagcggcgcattaagcgcggcgggtgtggtggttacgcgcagcgtgaccgctacacttgccagcgccctagcgcccgctcctttcgctttcttcccttcctttctcgccacgttcgccggctttccccgtcaagctctaaatcgggggctccctttagggttccgatttagtgctttacggcacctcgaccccaaaaaacttgattagggtgatggttcacgtagtgggccatcgccctgatagacggtttttcgccctttgacgttggagtccacgttctttaatagtggactcttgttccaaactggaacaacactcaaccctatctcggtctattcttttgatttataagggattttgccgatttcggcctattggttaaaaaatgagctgatttaacaaaaatttaacgcgaattaattctgtggaatgtgtgtcagttagggtgtggaaagtccccaggctccccagcaggcagaagtatgcaaagcatgcatctcaattagtcagcaaccaggtgtggaaagtccccaggctccccagcaggcagaagtatgcaaagcatgcatctcaattagtcagcaaccatagtcccgcccctaactccgcccatcccgcccctaactccgcccagttccgcccattctccgccccatggctgactaattttttttatttatgcagaggccgaggccgcctctgcctctgagctattccagaagtagtgaggaggcttttttggaggcctaggcttttgcaaaaagctcccgggagcttgtatatccattttcggatctgatcaagagacaggatgaggatcgtttcgcatgattgaacaagatggattgcacgcaggttctccggccgcttgggtggagaggctattcggctatgactgggcacaacagacaatcggctgctctgatgccgccgtgttccggctgtcagcgcaggggcgcccggttctttttgtcaagaccgacctgtccggtgccctgaatgaactgcaggacgaggcagcgcggctatcgtggctggccacgacgggcgttccttgcgcagctgtgctcgacgttgtcactgaagcgggaagggactggctgctattgggcgaagtgccggggcaggatctcctgtcatctcaccttgctcctgccgagaaagtatccatcatggctgatgcaatgcggcggctgcatacgcttgatccggctacctgcccattcgaccaccaagcgaaacatcgcatcgagcgagcacgtactcggatggaagccggtcttgtcgatcaggatgatctggacgaagagcatcaggggctcgcgccagccgaactgttcgccaggctcaaggcgcgcatgcccgacggcgaggatctcgtcgtgacccatggcgatgcctgcttgccgaatatcatggtggaaaatggccgcttttctggattcatcgactgtggccggctgggtgtggcggaccgctatcaggacatagcgttggctacccgtgatattgctgaagagcttggcggcgaatgggctgaccgcttcctcgtgctttacggtatcgccgctcccgattcgcagcgcatcgccttctatcgccttcttgacgagttcttctgagcgggactctggggttcgaaatgaccgaccaagcgacgcccaacctgccatcacgagatttcgattccaccgccgccttctatgaaaggttgggcttcggaatcgttttccgggacgccggctggatgatcctccagcgcggggatctcatgctggagttcttcgcccaccccaacttgtttattgcagcttataatggttacaaataaagcaatagcatcacaaatttcacaaataaagcatttttttcactgcattctagttgtggtttgtccaaactcatcaatgtatcttatcatgtctgtataccgtcgacctctagctagagcttggcgtaatcatggtcatagctgtttcctgtgtgaaattgttatccgctcacaattccacacaacatacgagccggaagcataaagtgtaaagcctggggtgcctaatgagtgagctaactcacattaattgcgttgcgctcactgcccgctttccagtcgggaaacctgtcgtgccagctgcattaatgaatcggccaacgcgcggggagaggcggtttgcgtattgggcgctcttccgcttcctcgctcactgactcgctgcgctcggtcgttcggctgcggcgagcggtatcagctcactcaaaggcggtaatacggttatccacagaatcaggggataacgcaggaaagaacatgtgagcaaaaggccagcaaaaggccaggaaccgtaaaaaggccgcgttgctggcgtttttccataggctccgcccccctgacgagcatcacaaaaatcgacgctcaagtcagaggtggcgaaacccgacaggactataaagataccaggcgtttccccctggaagctccctcgtgcgctctcctgttccgaccctgccgcttaccggatacctgtccgcctttctcccttcgggaagcgtggcgctttctcatagctcacgctgtaggtatctcagttcggtgtaggtcgttcgctccaagctgggctgtgtgcacgaaccccccgttcagcccgaccgctgcgccttatccggtaactatcgtcttgagtccaacccggtaagacacgacttatcgccactggcagcagccactggtaacaggattagcagagcgaggtatgtaggcggtgctacagagttcttgaagtggtggcctaactacggctacactagaagaacagtatttggtatctgcgctctgctgaagccagttaccttcggaaaaagagttggtagctcttgatccggcaaacaaaccaccgctggtagcggtttttttgtttgcaagcagcagattacgcgcagaaaaaaaggatctcaagaagatcctttgatcttttctacggggtctgacgctcagtggaacgaaaactcacgttaagggattttggtcatgagattatcaaaaaggatcttcacctagatccttttaaattaaaaatgaagttttaaatcaatctaaagtatatatgagtaaacttggtctgacagttaccaatgcttaatcagtgaggcacctatctcagcgatctgtctatttcgttcatccatagttgcctgactccccgtcgtgtagataactacgatacgggagggcttaccatctggccccagtgctgcaatgataccgcgagacccacgctcaccggctccagatttatcagcaataaaccagccagccggaagggccgagcgcagaagtggtcctgcaactttatccgcctccatccagtctattaattgttgccgggaagctagagtaagtagttcgccagttaatagtttgcgcaacgttgttgccattgctacaggcatcgtggtgtcacgctcgtcgtttggtatggcttcattcagctccggttcccaacgatcaaggcgagttacatgatcccccatgttgtgcaaaaaagcggttagctccttcggtcctccgatcgttgtcagaagtaagttggccgcagtgttatcactcatggttatggcagcactgcataattctcttactgtcatgccatccgtaagatgcttttctgtgactggtgagtactcaaccaagtcattctgagaatagtgtatgcggcgaccgagttgctcttgcccggcgtcaatacgggataataccgcgccacatagcagaactttaaaagtgctcatcattggaaaacgttcttcggggcgaaaactctcaaggatcttaccgctgttgagatccagttcgatgtaacccactcgtgcacccaactgatcttcagcatcttttactttcaccagcgtttctgggtgagcaaaaacaggaaggcaaaatgccgcaaaaaagggaataagggcgacacggaaatgttgaatactcatactcttcctttttcaatattattgaagcatttatcagggttattgtctcatgagcggatacatatttgaatgtatttagaaaaataaacaaataggggttccgcgcacatttccccgaaaagtgccacctgacgtc

SEQ ID NO: 114 - DNA, 10781 bp, synthetic construct
  misc_feature 1..10781: note pMD137-pcDNA3.1-SARS2-GGSG-foldon-G-6xHis-BirA-T2A-mScarlet
  source 1..10781: mol_type = other DNA
gacggatcgggagatctcccgatcccctatggtgcactctcagtacaatctgctctgatgccgcatagttaagccagtatctgctccctgcttgtgtgttggaggtcgctgagtagtgcgcgagcaaaatttaagctacaacaaggcaaggcttgaccgacaattgcatgaagaatctgcttagggttaggcgttttgcgctgcttcgcgatgtacgggccagatatacgcgttgacattgattattgactagttattaatagtaatcaattacggggtcattagttcatagcccatatatggagttccgcgttacataacttacggtaaatggcccgcctggctgaccgcccaacgacccccgcccattgacgtcaataatgacgtatgttcccatagtaacgccaatagggactttccattgacgtcaatgggtggagtatttacggtaaactgcccacttggcagtacatcaagtgtatcatatgccaagtacgccccctattgacgtcaatgacggtaaatggcccgcctggcattatgcccagtacatgaccttatgggactttcctacttggcagtacatctacgtattagtcatcgctattaccatggtgatgcggttttggcagtacatcaatgggcgtggatagcggtttgactcacggggatttccaagtctccaccccattgacgtcaatgggagtttgttttggcaccaaaatcaacgggactttccaaaatgtcgtaacaactccgccccattgacgcaaatgggcggtaggcgtgtacggtgggaggtctatataagcagagctctctggctaactagagaacccactgcttactggcttatcgaaattaatacgactcactatagggagacccaagctggatgtttgtgttcctggtgctgctgccactggtgtccagccagtgtgtgaacctgaccaccaggacccaacttcctcctgcctacaccaactccttcaccaggggagtctactaccctgacaaggtgttcaggtcctctgtgctgcacagcacccaggacctgttcctgccattcttcagcaatgtgacctggttccatgccatccatgtgtctggcaccaatggcaccaagaggtttgacaaccctgtgctgccattcaatgatggagtctactttgccagcacagagaagagcaacatcatcaggggctggatttttggcaccaccctggacagcaagacccagtccctgctgattgtgaacaatgccaccaatgtggtgattaaggtgtgtgagttccagttctgtaatgacccattcctgggagtctactaccacaagaacaacaagtcctggatggagtctgagttcagggtctactcctctgccaacaactgtacctttgaatatgtgagccaaccattcctgatggacttggagggcaagcagggcaacttcaagaacctgagggagtttgtgttcaagaacattgatggctacttcaagatttacagcaaacacacaccaatcaacctggtgagggacctgccacagggcttctctgccttggaaccactggtggacctgccaattggcatcaacatcaccaggttccagaccctgctggctctgcacaggtcctacctgacacctggagactcctcctctggctggacagcaggagcagcagcctactatgtgggctacctccaaccaaggaccttcctgctgaaatacaatgagaatggcaccatcacagatgctgtggactgtgccctggacccactgtctgagaccaagtgtaccctgaaatccttcacagtggagaagggcatctaccagaccagcaacttcagggtccaaccaacagagagcattgtgaggtttccaaacatcaccaacctgtgtccatttggagaggtgttcaatgccaccaggtttgcctctgtctatgcctggaacaggaagaggattagcaactgtgtggctgactactctgtgctctacaactctgcctccttcagcaccttcaagtgttatggagtgagcccaaccaaactgaatgacctgtgtttcaccaatgtctatgctgactcctttgtgattaggggagatgaggtgagacagattgcccctggacaaacaggcaagattgctgactacaactacaaactgcctgatgacttcacaggctgtgtgattgcctggaacagcaacaacctggacagcaaggtgggaggcaactacaactacctctacagactgttcaggaagagcaacctgaaaccatttgagagggacatcagcacagagatttaccaggctggcagcacaccatgtaatggagtggagggcttcaactgttactttccactccaatcctatggcttccaaccaaccaatggagtgggctaccaaccatacagggtggtggtgctgtcctttgaactgctccatgcccctgccacagtgtgtggaccaaagaagagcaccaacctggtgaagaacaagtgtgtgaacttcaacttcaatggactgacaggcacaggagtgctgacagagagcaacaagaagttcctgccattccaacagtttggcagggacattgctgacaccacagatgctgtgagggacccacagaccttggagattctggacatcacaccatgttcctttggaggagtgtctgtgattacacctggcaccaacaccagcaaccaggtggctgtgctctaccaggatgtgaactgtactgaggtgcctgtggctatccatgctgaccaacttacaccaacctggagggtctacagcacaggcagcaatgtgttccagaccagggctggctgtctgattggagcagagcatgtgaacaactcctatgagtgtgacatcccaattggagcaggcatctgtgcctcctaccagacccagaccaacagcccaaggagggcaaggtctgtggcaagccagagcatcattgcctacacaatgagtctgggagcagagaactctgtggcttacagcaacaacagcattgccatcccaaccaacttcaccatctctgtgaccacagagattctgcctgtgagtatgaccaagacctctgtggactgtacaatgtatatctgtggagacagcacagagtgtagcaacctgctgctccaatatggctccttctgtacccaacttaacagggctctgacaggcattgctgtggaacaggacaagaacacccaggaggtgtttgcccaggtgaagcagatttacaagacacctccaatcaaggactttggaggcttcaacttcagccagattctgcctgacccaagcaagccaagcaagaggtccttcattgaggacctgctgttcaacaaggtgaccctggctgatgctggcttcatcaagcaatatggagactgtctgggagacattgctgccagggacctgatttgtgcccagaagttcaatggactgacagtgctgcctccactgctgacagatgagatgattgcccaatacacctctgccctgctggctggcaccatcacctctggctggacctttggagcaggagcagccctccaaatcccatttgctatgcagatggcttacaggttcaatggcattggagtgacccagaatgtgctctatgagaaccagaaactgattgccaaccagttcaactctgccattggcaagattcaggactccctgtccagcacagcctctgccctgggcaaactccaagatgtggtgaaccagaatgcccaggctctgaacaccctggtgaagcaactttccagcaactttggagccatctcctctgtgctgaatgacatcctgagcagactggaccctcccgaggctgaggtccagattgacagactgattacaggcagactccaatccctccaaacctatgtgacccaacaacttatcagggctgctgagattagggcatctgccaacctggctgccaccaagatgagtgagtgtgtgctgggacaaagcaagagggtggacttctgtggcaagggctaccacctgatgagttttccacagtctgcccctcatggagtggtgttcctgcatgtgacctatgtgcctgcccaggagaagaacttcaccacagcccctgccatctgccatgatggcaaggctcactttccaagggagggagtgtttgtgagcaatggcacccactggtttgtgacccagaggaacttctatgaaccacagattatcaccacagacaacacctttgtgtctggcaactgtgatgtggtgattggcattgtgaacaacacagtctatgacccactccaacctgaactggactccttcaaggaggaactggacaaatacttcaagaaccacaccagccctgatgtggacctgggagacatctctggcatcaatgcctctgtggtgaacatccagaaggagattgacagactgaatgaggtggctaagaacctgaatgagtccctgattgacctccaagaactgggcaaaggcggaggcagcgggtatattccggaggctccaagagacggtcaggcgtacgtacggaaggacggcgaatgggttctcttgagcactttcttaggccatcatcatcaccaccatatgaaggacaacacagtcccgctgaaacttattgcgcttctcgcaaatggagagttccactctggagagcaactcggcgagaccctgggaatgagtcgggcggctatcaacaagcatatacagactttgagggattggggtgtggatgtcttcactgttccgggtaagggctattcactgcccgaaccgatccaacttctcaatgccaaacagatattggggcaacttgatggtggctctgtcgccgtgttgccggtcatcgatagcacgaaccaatatctcttggaccgcatcggagaactcaagagcggagacgcatgtatagcggaatatcagcaagccggtagaggaagaaggggacggaaatggttctctccattcggagccaacctgtatttgagcatgttctggcgattggagcagggaccagccgccgccatcggtctctctcttgtcataggtattgtcatggcggaagtcctccgcaaactcggggccgacaaagtacgcgtgaaatggccgaacgacctctatcttcaggataggaaattggcagggatattggttgaactgacgggtaagacgggggacgccgctcagattgttataggtgccggaataaacatggccatgcgcagagttgaagagtcagtggtaaaccagggttggatcactctccaagaggcgggaataaacctggatcgcaacacactggctgccatgcttatacgggaactccgagctgcattggaactgttcgagcaagaagggcttgctccgtacttgagcaggtgggaaaagctggataatttcataaatcgccctgttaaactcatcatcggagataaagagatttttggcataagtcgaggaatcgataaacaaggtgcattgctgcttgagcaagacggtataatcaaaccttggatgggtggcgaaatctcacttagaagcgcggaaaaatatgaacaaggcagtggagagggcagaggaagtctgctaacatgcggtgacgtcgaggagaatcctggcccaatgagtaaaggagaagctgtgattaaagagttcatgcgcttcaaagttcacatggagggttctatgaacggtcacgagttcgagatcgaaggcgaaggcgagggccgtccgtatgaaggcacccagaccgccaaactgaaagtgactaaaggcggcccgctgcctttttcctgggacatcctgagcccgcaatttatgtacggttctagggcgttcaccaaacacccagcggatatcccggactattataagcagtcttttccggaaggtttcaagtgggaacgcgtaatgaattttgaagatggtggtgccgtgaccgtcactcaggacacctccctggaggatggcaccctgatctataaagttaaactgcgtggtactaattttccacctgatggcccggtgatgcagaaaaagacgatgggttgggaggcgtctaccgaacgcttgtatccggaagatggtgtgctgaaaggcgacattaaaatggccctgcgcctgaaagatggcggccgctatctggctgacttcaaaaccacgtacaaagccaagaaacctgtgcagatgcctggcgcgtacaatgtggaccgcaaactggacatcacctctcataatgaagattatacggtggtagagcaatatgagcgctccgagggtcgtcattctaccggtggcatggatgaactatacaaataagtttaaacccgctgatcagcctcgactgtgccttctagttgccagccatctgttgtttgcccctcccccgtgccttccttgaccctggaaggtgccactcccactgtcctttcctaataaaatgaggaaattgcatcgcattgtctgagtaggtgtcattctattctggggggtggggtggggcaggacagcaagggggaggattgggaagacaatagcaggcatgctggggatgcggtgggctctatggcttctgaggcggaaagaaccagctggggctctagggggtatccccacgcgccctgtagcggcgcattaagcgcggcgggtgtggtggttacgcgcagcgtgaccgctacacttgccagcgccctagcgcccgctcctttcgctttcttcccttcctttctcgccacgttcgccggctttccccgtcaagctctaaatcgggggctccctttagggttccgatttagtgctttacggcacctcgaccccaaaaaacttgattagggtgatggttcacgtagtgggccatcgccctgatagacggtttttcgccctttgacgttggagtccacgttctttaatagtggactcttgttccaaactggaacaacactcaaccctatctcggtctattcttttgatttataagggattttgccgatttcggcctattggttaaaaaatgagctgatttaacaaaaatttaacgcgaattaattctgtggaatgtgtgtcagttagggtgtggaaagtccccaggctccccagcaggcagaagtatgcaaagcatgcatctcaattagtcagcaaccaggtgtggaaagtccccaggctccccagcaggcagaagtatgcaaagcatgcatctcaattagtcagcaaccatagtcccgcccctaactccgcccatcccgcccctaactccgcccagttccgcccattctccgccccatggctgactaattttttttatttatgcagaggccgaggccgcctctgcctctgagctattccagaagtagtgaggaggcttttttggaggcctaggcttttgcaaaaagctcccgggagcttgtatatccattttcggatctgatcaagagacaggatgaggatcgtttcgcatgattgaacaagatggattgcacgcaggttctccggccgcttgggtggagaggctattcggctatgactgggcacaacagacaatcggctgctctgatgccgccgtgttccggctgtcagcgcaggggcgcccggttctttttgtcaagaccgacctgtccggtgccctgaatgaactgcaggacgaggcagcgcggctatcgtggctggccacgacgggcgttccttgcgcagctgtgctcgacgttgtcactgaagcgggaagggactggctgctattgggcgaagtgccggggcaggatctcctgtcatctcaccttgctcctgccgagaaagtatccatcatggctgatgcaatgcggcggctgcatacgcttgatccggctacctgcccattcgaccaccaagcgaaacatcgcatcgagcgagcacgtactcggatggaagccggtcttgtcgatcaggatgatctggacgaagagcatcaggggctcgcgccagccgaactgttcgccaggctcaaggcgcgcatgcccgacggcgaggatctcgtcgtgacccatggcgatgcctgcttgccgaatatcatggtggaaaatggccgcttttctggattcatcgactgtggccggctgggtgtggcggaccgctatcaggacatagcgttggctacccgtgatattgctgaagagcttggcggcgaatgggctgaccgcttcctcgtgctttacggtatcgccgctcccgattcgcagcgcatcgccttctatcgccttcttgacgagttcttctgagcgggactctggggttcgaaatgaccgaccaagcgacgcccaacctgccatcacgagatttcgattccaccgccgccttctatgaaaggttgggcttcggaatcgttttccgggacgccggctggatgatcctccagcgcggggatctcatgctggagttcttcgcccaccccaacttgtttattgcagcttataatggttacaaataaagcaatagcatcacaaatttcacaaataaagcatttttttcactgcattctagttgtggtttgtccaaactcatcaatgtatcttatcatgtctgtataccgtcgacctctagctagagcttggcgtaatcatggtcatagctgtttcctgtgtgaaattgttatccgctcacaattccacacaacatacgagccggaagcataaagtgtaaagcctggggtgcctaatgagtgagctaactcacattaattgcgttgcgctcactgcccgctttccagtcgggaaacctgtcgtgccagctgcattaatgaatcggccaacgcgcggggagaggcggtttgcgtattgggcgctcttccgcttcctcgctcactgactcgctgcgctcggtcgttcggctgcggcgagcggtatcagctcactcaaaggcggtaatacggttatccacagaatcaggggataacgcaggaaagaacatgtgagcaaaaggccagcaaaaggccaggaaccgtaaaaaggccgcgttgctggcgtttttccataggctccgcccccctgacgagcatcacaaaaatcgacgctcaagtcagaggtggcgaaacccgacaggactataaagataccaggcgtttccccctggaagctccctcgtgcgctctcctgttccgaccctgccgcttaccggatacctgtccgcctttctcccttcgggaagcgtggcgctttctcatagctcacgctgtaggtatctcagttcggtgtaggtcgttcgctccaagctgggctgtgtgcacgaaccccccgttcagcccgaccgctgcgccttatccggtaactatcgtcttgagtccaacccggtaagacacgacttatcgccactggcagcagccactggtaacaggattagcagagcgaggtatgtaggcggtgctacagagttcttgaagtggtggcctaactacggctacactagaagaacagtatttggtatctgcgctctgctgaagccagttaccttcggaaaaagagttggtagctcttgatccggcaaacaaaccaccgctggtagcggtttttttgtttgcaagcagcagattacgcgcagaaaaaaaggatctcaagaagatcctttgatcttttctacggggtctgacgctcagtggaacgaaaactcacgttaagggattttggtcatgagattatcaaaaaggatcttcacctagatccttttaaattaaaaatgaagttttaaatcaatctaaagtatatatgagtaaacttggtctgacagttaccaatgcttaatcagtgaggcacctatctcagcgatctgtctatttcgttcatccatagttgcctgactccccgtcgtgtagataactacgatacgggagggcttaccatctggccccagtgctgcaatgataccgcgagacccacgctcaccggctccagatttatcagcaataaaccagccagccggaagggccgagcgcagaagtggtcctgcaactttatccgcctccatccagtctattaattgttgccgggaagctagagtaagtagttcgccagttaatagtttgcgcaacgttgttgccattgctacaggcatcgtggtgtcacgctcgtcgtttggtatggcttcattcagctccggttcccaacgatcaaggcgagttacatgatcccccatgttgtgcaaaaaagcggttagctccttcggtcctccgatcgttgtcagaagtaagttggccgcagtgttatcactcatggttatggcagcactgcataattctcttactgtcatgccatccgtaagatgcttttctgtgactggtgagtactcaaccaagtcattctgagaatagtgtatgcggcgaccgagttgctcttgcccggcgtcaatacgggataataccgcgccacatagcagaactttaaaagtgctcatcattggaaaacgttcttcggggcgaaaactctcaaggatcttaccgctgttgagatccagttcgatgtaacccactcgtgcacccaactgatcttcagcatcttttactttcaccagcgtttctgggtgagcaaaaacaggaaggcaaaatgccgcaaaaaagggaataagggcgacacggaaatgttgaatactcatactcttcctttttcaatattattgaagcatttatcagggttattgtctcatgagcggatacatatttgaatgtatttagaaaaataaacaaataggggttccgcgcacatttccccgaaaagtgccacctgacgtc

SEQ ID NO: 115 - DNA, 11108 bp, synthetic construct
  misc_feature 1..11108: note pMD138-pcDNA3.1-SARS2_mut_v1-GGSG-foldon-G-6xHis-BirA-T2A-m Scarlet
  source 1..11108: mol_type = other DNA
gacggatcgggagatctcccgatcccctatggtgcactctcagtacaatctgctctgatgccgcatagttaagccagtatctgctccctgcttgtgtgttggaggtcgctgagtagtgcgcgagcaaaatttaagctacaacaaggcaaggcttgaccgacaattgcatgaagaatctgcttagggttaggcgttttgcgctgcttcgcgatgtacgggccagatatacgcgttgacattgattattgactagttattaatagtaatcaattacggggtcattagttcatagcccatatatggagttccgcgttacataacttacggtaaatggcccgcctggctgaccgcccaacgacccccgcccattgacgtcaataatgacgtatgttcccatagtaacgccaatagggactttccattgacgtcaatgggtggagtatttacggtaaactgcccacttggcagtacatcaagtgtatcatatgccaagtacgccccctattgacgtcaatgacggtaaatggcccgcctggcattatgcccagtacatgaccttatgggactttcctacttggcagtacatctacgtattagtcatcgctattaccatggtgatgcggttttggcagtacatcaatgggcgtggatagcggtttgactcacggggatttccaagtctccaccccattgacgtcaatgggagtttgttttggcaccaaaatcaacgggactttccaaaatgtcgtaacaactccgccccattgacgcaaatgggcggtaggcgtgtacggtgggaggtctatataagcagagctctctggctaactagagaacccactgcttactggcttatcgaaattaatacgactcactatagggagacccaagctggatgtttgtgttcctggtgctgctgccactggtgtccagccagtgtgtgaacctgaccaccaggacccaacttcctcctgcctacaccaactccttcaccaggggagtctactaccctgacaaggtgttcaggtcctctgtgctgcacagcacccaggacctgttcctgccattcttcagcaatgtgacctggttccatgccatccatgtgtctggcaccaatggcaccaagaggtttgacaaccctgtgctgccattcaatgatggagtctactttgccagcacagagaagagcaacatcatcaggggctggatttttggcaccaccctggacagcaagacccagtccctgctgattgtgaacaatgccaccaatgtggtgattaaggtgtgtgagttccagttctgtaatgacccattcctgggagtctactaccacaagaacaacaagtcctggatggagtctgagttcagggtctactcctctgccaacaactgtacctttgaatatgtgagccaaccattcctgatggacttggagggcaagcagggcaacttcaagaacctgagggagtttgtgttcaagaacattgatggctacttcaagatttacagcaaacacacaccaatcaacctggtgagggacctgccacagggcttctctgccttggaaccactggtggacctgccaattggcatcaacatcaccaggttccagaccctgctggctctgcacaggtcctacctgacacctggagactcctcctctggctggacagcaggagcagcagcctactatgtgggctacctccaaccaaggaccttcctgctgaaatacaatgagaatggcaccatcacagatgctgagggcaagcagggcaacttcaagaacctgagggagtttgtgttcaagaacattgatggctacttcaagatttacagcaaacacacaccaatcaacctggtgagggacctgccacagggcttctctgccttggaaccactggtggacctgccaattggcatcaacatcaccaggttccagaccctgctggctctgcacaggtcctacctgacacctggagactcctcctctggctggacagcaggagcagcagcctactatgtgggctacctccaaccaaggaccttcctgctgaaatacaatgagaatggcaccatcacagatgctgtggactgtgccctggacccactgtctgagaccaagtgtaccctgaaatccttcacagtggagaagggcatctaccagaccagcaacttcagggtccaaccaacagagagcattgtgaggtttccaaacatcaccaacctgtgtccatttggagaggtgttcaatgccaccaggtttgcctctgtctatgcctggaacaggaagaggattagcaactgtgtggctgactactctgtgctctacaactctgcctccttcagcaccttcaagtgttatggagtgagcccaaccaaactgaatgacctgtgtttcaccaatgtctatgctgactcctttgtgattaggggagatgaggtgagacagattgcccctggacaaacaggcaagattgctgactacaactacaaactgcctgatgacttcacaggctgtgtgattgcctggaacagcgccaacctggacagcaaggtgggaggcaacgccaactacctctacagactgttcaggaagagcaacctgaaaccatttgagagggacatcagcacagagatttaccaggctggcagcacaccatgtaatggagtggagggcttcaactgttactttccactccaatcctatggcttcgccccagctgccggagtgggctaccaaccatacagggtggtggtgctgtcctttgaactgctccatgcccctgccacagtgtgtggaccaaagaagagcaccaacctggtgaagaacaagtgtgtgaacttcaacttcaatggactgacaggcacaggagtgctgacagagagcaacaagaagttcctgccattccaacagtttggcagggacattgctgacaccacagatgctgtgagggacccacagaccttggagattctggacatcacaccatgttcctttggaggagtgtctgtgattacacctggcaccaacaccagcaaccaggtggctgtgctctaccaggatgtgaactgtactgaggtgcctgtggctatccatgctgaccaacttacaccaacctggagggtctacagcacaggcagcaatgtgttccagaccagggctggctgtctgattggagcagagcatgtgaacaactcctatgagtgtgacatcccaattggagcaggcatctgtgcctcctaccagacccagaccaacagcccaaggagggcaaggtctgtggcaagccagagcatcattgcctacacaatgagtctgggagcagagaactctgtggcttacagcaacaacagcattgccatcccaaccaacttcaccatctctgtgaccacagagattctgcctgtgagtatgaccaagacctctgtggactgtacaatgtatatctgtggagacagcacagagtgtagcaacctgctgctccaatatggctccttctgtacccaacttaacagggctctgacaggcattgctgtggaacaggacaagaacacccaggaggtgtttgcccaggtgaagcagatttacaagacacctccaatcaaggactttggaggcttcaacttcagccagattctgcctgacccaagcaagccaagcaagaggtccttcattgaggacctgctgttcaacaaggtgaccctggctgatgctggcttcatcaagcaatatggagactgtctgggagacattgctgccagggacctgatttgtgcccagaagttcaatggactgacagtgctgcctccactgctgacagatgagatgattgcccaatacacctctgccctgctggctggcaccatcacctctggctggacctttggagcaggagcagccctccaaatcccatttgctatgcagatggcttacaggttcaatggcattggagtgacccagaatgtgctctatgagaaccagaaactgattgccaaccagttcaactctgccattggcaagattcaggactccctgtccagcacagcctctgccctgggcaaactccaagatgtggtgaaccagaatgcccaggctctgaacaccctggtgaagcaactttccagcaactttggagccatctcctctgtgctgaatgacatcctgagcagactggaccctcccgaggctgaggtccagattgacagactgattacaggcagactccaatccctccaaacctatgtgacccaacaacttatcagggctgctgagattagggcatctgccaacctggctgccaccaagatgagtgagtgtgtgctgggacaaagcaagagggtggacttctgtggcaagggctaccacctgatgagttttccacagtctgcccctcatggagtggtgttcctgcatgtgacctatgtgcctgcccaggagaagaacttcaccacagcccctgccatctgccatgatggcaaggctcactttccaagggagggagtgtttgtgagcaatggcacccactggtttgtgacccagaggaacttctatgaaccacagattatcaccacagacaacacctttgtgtctggcaactgtgatgtggtgattggcattgtgaacaacacagtctatgacccactccaacctgaactggactccttcaaggaggaactggacaaatacttcaagaaccacaccagccctgatgtggacctgggagacatctctggcatcaatgcctctgtggtgaacatccagaaggagattgacagactgaatgaggtggctaagaacctgaatgagtccctgattgacctccaagaactgggcaaaggcggaggcagcgggtatattccggaggctccaagagacggtcaggcgtacgtacggaaggacggcgaatgggttctcttgagcactttcttaggccatcatcatcaccaccatatgaaggacaacacagtcccgctgaaacttattgcgcttctcgcaaatggagagttccactctggagagcaactcggcgagaccctgggaatgagtcgggcggctatcaacaagcatatacagactttgagggattggggtgtggatgtcttcactgttccgggtaagggctattcactgcccgaaccgatccaacttctcaatgccaaacagatattggggcaacttgatggtggctctgtcgccgtgttgccggtcatcgatagcacgaaccaatatctcttggaccgcatcggagaactcaagagcggagacgcatgtatagcggaatatcagcaagccggtagaggaagaaggggacggaaatggttctctccattcggagccaacctgtatttgagcatgttctggcgattggagcagggaccagccgccgccatcggtctctctcttgtcataggtattgtcatggcggaagtcctccgcaaactcggggccgacaaagtacgcgtgaaatggccgaacgacctctatcttcaggataggaaattggcagggatattggttgaactgacgggtaagacgggggacgccgctcagattgttataggtgccggaataaacatggccatgcgcagagttgaagagtcagtggtaaaccagggttggatcactctccaagaggcgggaataaacctggatcgcaacacactggctgccatgcttatacgggaactccgagctgcattggaactgttcgagcaagaagggcttgctccgtacttgagcaggtgggaaaagctggataatttcataaatcgccctgttaaactcatcatcggagataaagagatttttggcataagtcgaggaatcgataaacaaggtgcattgctgcttgagcaagacggtataatcaaaccttggatgggtggcgaaatctcacttagaagcgcggaaaaatatgaacaaggcagtggagagggcagaggaagtctgctaacatgcggtgacgtcgaggagaatcctggcccaatgagtaaaggagaagctgtgattaaagagttcatgcgcttcaaagttcacatggagggttctatgaacggtcacgagttcgagatcgaaggcgaaggcgagggccgtccgtatgaaggcacccagaccgccaaactgaaagtgactaaaggcggcccgctgcctttttcctgggacatcctgagcccgcaatttatgtacggttctagggcgttcaccaaacacccagcggatatcccggactattataagcagtcttttccggaaggtttcaagtgggaacgcgtaatgaattttgaagatggtggtgccgtgaccgtcactcaggacacctccctggaggatggcaccctgatctataaagttaaactgcgtggtactaattttccacctgatggcccggtgatgcagaaaaagacgatgggttgggaggcgtctaccgaacgcttgtatccggaagatggtgtgctgaaaggcgacattaaaatggccctgcgcctgaaagatggcggccgctatctggctgacttcaaaaccacgtacaaagccaagaaacctgtgcagatgcctggcgcgtacaatgtggaccgcaaactggacatcacctctcataatgaagattatacggtggtagagcaatatgagcgctccgagggtcgtcattctaccggtggcatggatgaactatacaaataagtttaaacccgctgatcagcctcgactgtgccttctagttgccagccatctgttgtttgcccctcccccgtgccttccttgaccctggaaggtgccactcccactgtcctttcctaataaaatgaggaaattgcatcgcattgtctgagtaggtgtcattctattctggggggtggggtggggcaggacagcaagggggaggattgggaagacaatagcaggcatgctggggatgcggtgggctctatggcttctgaggcggaaagaaccagctggggctctagggggtatccccacgcgccctgtagcggcgcattaagcgcggcgggtgtggtggttacgcgcagcgtgaccgctacacttgccagcgccctagcgcccgctcctttcgctttcttcccttcctttctcgccacgttcgccggctttccccgtcaagctctaaatcgggggctccctttagggttccgatttagtgctttacggcacctcgaccccaaaaaacttgattagggtgatggttcacgtagtgggccatcgccctgatagacggtttttcgccctttgacgttggagtccacgttctttaatagtggactcttgttccaaactggaacaacactcaaccctatctcggtctattcttttgatttataagggattttgccgatttcggcctattggttaaaaaatgagctgatttaacaaaaatttaacgcgaattaattctgtggaatgtgtgtcagttagggtgtggaaagtccccaggctccccagcaggcagaagtatgcaaagcatgcatctcaattagtcagcaaccaggtgtggaaagtccccaggctccccagcaggcagaagtatgcaaagcatgcatctcaattagtcagcaaccatagtcccgcccctaactccgcccatcccgcccctaactccgcccagttccgcccattctccgccccatggctgactaattttttttatttatgcagaggccgaggccgcctctgcctctgagctattccagaagtagtgaggaggcttttttggaggcctaggcttttgcaaaaagctcccgggagcttgtatatccattttcggatctgatcaagagacaggatgaggatcgtttcgcatgattgaacaagatggattgcacgcaggttctccggccgcttgggtggagaggctattcggctatgactgggcacaacagacaatcggctgctctgatgccgccgtgttccggctgtcagcgcaggggcgcccggttctttttgtcaagaccgacctgtccggtgccctgaatgaactgcaggacgaggcagcgcggctatcgtggctggccacgacgggcgttccttgcgcagctgtgctcgacgttgtcactgaagcgggaagggactggctgctattgggcgaagtgccggggcaggatctcctgtcatctcaccttgctcctgccgagaaagtatccatcatggctgatgcaatgcggcggctgcatacgcttgatccggctacctgcccattcgaccaccaagcgaaacatcgcatcgagcgagcacgtactcggatggaagccggtcttgtcgatcaggatgatctggacgaagagcatcaggggctcgcgccagccgaactgttcgccaggctcaaggcgcgcatgcccgacggcgaggatctcgtcgtgacccatggcgatgcctgcttgccgaatatcatggtggaaaatggccgcttttctggattcatcgactgtggccggctgggtgtggcggaccgctatcaggacatagcgttggctacccgtgatattgctgaagagcttggcggcgaatgggctgaccgcttcctcgtgctttacggtatcgccgctcccgattcgcagcgcatcgccttctatcgccttcttgacgagttcttctgagcgggactctggggttcgaaatgaccgaccaagcgacgcccaacctgccatcacgagatttcgattccaccgccgccttctatgaaaggttgggcttcggaatcgttttccgggacgccggctggatgatcctccagcgcggggatctcatgctggagttcttcgcccaccccaacttgtttattgcagcttataatggttacaaataaagcaatagcatcacaaatttcacaaataaagcatttttttcactgcattctagttgtggtttgtccaaactcatcaatgtatcttatcatgtctgtataccgtcgacctctagctagagcttggcgtaatcatggtcatagctgtttcctgtgtgaaattgttatccgctcacaattccacacaacatacgagccggaagcataaagtgtaaagcctggggtgcctaatgagtgagctaactcacattaattgcgttgcgctcactgcccgctttccagtcgggaaacctgtcgtgccagctgcattaatgaatcggccaacgcgcggggagaggcggtttgcgtattgggcgctcttccgcttcctcgctcactgactcgctgcgctcggtcgttcggctgcggcgagcggtatcagctcactcaaaggcggtaatacggttatccacagaatcaggggataacgcaggaaagaacatgtgagcaaaaggccagcaaaaggccaggaaccgtaaaaaggccgcgttgctggcgtttttccataggctccgcccccctgacgagcatcacaaaaatcgacgctcaagtcagaggtggcgaaacccgacaggactataaagataccaggcgtttccccctggaagctccctcgtgcgctctcctgttccgaccctgccgcttaccggatacctgtccgcctttctcccttcgggaagcgtggcgctttctcatagctcacgctgtaggtatctcagttcggtgtaggtcgttcgctccaagctgggctgtgtgcacgaaccccccgttcagcccgaccgctgcgccttatccggtaactatcgtcttgagtccaacccggtaagacacgacttatcgccactggcagcagccactggtaacaggattagcagagcgaggtatgtaggcggtgctacagagttcttgaagtggtggcctaactacggctacactagaagaacagtatttggtatctgcgctctgctgaagccagttaccttcggaaaaagagttggtagctcttgatccggcaaacaaaccaccgctggtagcggtttttttgtttgcaagcagcagattacgcgcagaaaaaaaggatctcaagaagatcctttgatcttttctacggggtctgacgctcagtggaacgaaaactcacgttaagggattttggtcatgagattatcaaaaaggatcttcacctagatccttttaaattaaaaatgaagttttaaatcaatctaaagtatatatgagtaaacttggtctgacagttaccaatgcttaatcagtgaggcacctatctcagcgatctgtctatttcgttcatccatagttgcctgactccccgtcgtgtagataactacgatacgggagggcttaccatctggccccagtgctgcaatgataccgcgagacccacgctcaccggctccagatttatcagcaataaaccagccagccggaagggccgagcgcagaagtggtcctgcaactttatccgcctccatccagtctattaattgttgccgggaagctagagtaagtagttcgccagttaatagtttgcgcaacgttgttgccattgctacaggcatcgtggtgtcacgctcgtcgtttggtatggcttcattcagctccggttcccaacgatcaaggcgagttacatgatcccccatgttgtgcaaaaaagcggttagctccttcggtcctccgatcgttgtcagaagtaagttggccgcagtgttatcactcatggttatggcagcactgcataattctcttactgtcatgccatccgtaagatgcttttctgtgactggtgagtactcaaccaagtcattctgagaatagtgtatgcggcgaccgagttgctcttgcccggcgtcaatacgggataataccgcgccacatagcagaactttaaaagtgctcatcattggaaaacgttcttcggggcgaaaactctcaaggatcttaccgctgttgagatccagttcgatgtaacccactcgtgcacccaactgatcttcagcatcttttactttcaccagcgtttctgggtgagcaaaaacaggaaggcaaaatgccgcaaaaaagggaataagggcgacacggaaatgttgaatactcatactcttcctttttcaatattattgaagcatttatcagggttattgtctcatgagcggatacatatttgaatgtatttagaaaaataaacaaataggggttccgcgcacatttccccgaaaagtgccacctgacgtc

SEQ ID NO: 116 - DNA, 11108 bp, synthetic construct
  misc_feature 1..11108: note pMD139-pcDNA3.1-SARS2_mut_v2-GGSG-foldon-G-6xHis-BirA-T2A-m Scarlet
  source 1..11108: mol_type = other DNA
gacggatcgggagatctcccgatcccctatggtgcactctcagtacaatctgctctgatgccgcatagttaagccagtatctgctccctgcttgtgtgttggaggtcgctgagtagtgcgcgagcaaaatttaagctacaacaaggcaaggcttgaccgacaattgcatgaagaatctgcttagggttaggcgttttgcgctgcttcgcgatgtacgggccagatatacgcgttgacattgattattgactagttattaatagtaatcaattacggggtcattagttcatagcccatatatggagttccgcgttacataacttacggtaaatggcccgcctggctgaccgcccaacgacccccgcccattgacgtcaataatgacgtatgttcccatagtaacgccaatagggactttccattgacgtcaatgggtggagtatttacggtaaactgcccacttggcagtacatcaagtgtatcatatgccaagtacgccccctattgacgtcaatgacggtaaatggcccgcctggcattatgcccagtacatgaccttatgggactttcctacttggcagtacatctacgtattagtcatcgctattaccatggtgatgcggttttggcagtacatcaatgggcgtggatagcggtttgactcacggggatttccaagtctccaccccattgacgtcaatgggagtttgttttggcaccaaaatcaacgggactttccaaaatgtcgtaacaactccgccccattgacgcaaatgggcggtaggcgtgtacggtgggaggtctatataagcagagctctctggctaactagagaacccactgcttactggcttatcgaaattaatacgactcactatagggagacccaagctggatgtttgtgttcctggtgctgctgccactggtgtccagccagtgtgtgaacctgaccaccaggacccaacttcctcctgcctacaccaactccttcaccaggggagtctactaccctgacaaggtgttcaggtcctctgtgctgcacagcacccaggacctgttcctgccattcttcagcaatgtgacctggttccatgccatccatgtgtctggcaccaatggcaccaagaggtttgacaaccctgtgctgccattcaatgatggagtctactttgccagcacagagaagagcaacatcatcaggggctggatttttggcaccaccctggacagcaagacccagtccctgctgattgtgaacaatgccaccaatgtggtgattaaggtgtgtgagttccagttctgtaatgacccattcctgggagtctactaccacaagaacaacaagtcctggatggagtctgagttcagggtctactcctctgccaacaactgtacctttgaatatgtgagccaaccattcctgatggacttggagggcaagcagggcaacttcaagaacctgagggagtttgtgttcaagaacattgatggctacttcaagatttacagcaaacacacaccaatcaacctggtgagggacctgccacagggcttctctgccttggaaccactggtggacctgccaattggcatcaacatcaccaggttccagaccctgctggctctgcacaggtcctacctgacacctggagactcctcctctggctggacagcaggagcagcagcctactatgtgggctacctccaaccaaggaccttcctgctgaaatacaatgagaatggcaccatcacagatgctgagggcaagcagggcaacttcaagaacctgagggagtttgtgttcaagaacattgatggctacttcaagatttacagcaaacacacaccaatcaacctggtgagggacctgccacagggcttctctgccttggaaccactggtggacctgccaattggcatcaacatcaccaggttccagaccctgctggctctgcacaggtcctacctgacacctggagactcctcctctggctggacagcaggagcagcagcctactatgtgggctacctccaaccaaggaccttcctgctgaaatacaatgagaatggcaccatcacagatgctgtggactgtgccctggacccactgtctgagaccaagtgtaccctgaaatccttcacagtggagaagggcatctaccagaccagcaacttcagggtccaaccaacagagagcattgtgaggtttccaaacatcaccaacctgtgtccatttggagaggtgttcaatgccaccaggtttgcctctgtctatgcctggaacaggaagaggattagcaactgtgtggctgactactctgtgctctacaactctgcctccttcagcaccttcaagtgttatggagtgagcccaaccaaactgaatgacctgtgtttcaccaatgtctatgctgactcctttgtgattaggggagatgaggtgagacagattgcccctggacaaacaggcgccattgctgactacaactacaaactgcctgatgacttcacaggctgtgtgattgcctggaacagcaacaacctggacagcaaggtgggaggcaactacaactacctctacagagccgctaggaagagcaacctgaaaccatttgagagggacatcagcacagagattgcccaggctggcagcacaccatgtaatggagtggagggcttcaactgttactttccactcgcctcctatggcttccaaccaaccaatggagtgggctaccaaccatacagggtggtggtgctgtcctttgaactgctccatgcccctgccacagtgtgtggaccaaagaagagcaccaacctggtgaagaacaagtgtgtgaacttcaacgccaatggactgacaggcacaggagtgctgacagagagcaacaagaagttcctgccattccaacagtttggcagggacattgctgacaccacagatgctgtgagggacccacagaccttggagattctggacatcacaccatgttcctttggaggagtgtctgtgattacacctggcaccaacaccagcaaccaggtggctgtgctctaccaggatgtgaactgtactgaggtgcctgtggctatccatgctgaccaacttacaccaacctggagggtctacagcacaggcagcaatgtgttccagaccagggctggctgtctgattggagcagagcatgtgaacaactcctatgagtgtgacatcccaattggagcaggcatctgtgcctcctaccagacccagaccaacagcccaaggagggcaaggtctgtggcaagccagagcatcattgcctacacaatgagtctgggagcagagaactctgtggcttacagcaacaacagcattgccatcccaaccaacttcaccatctctgtgaccacagagattctgcctgtgagtatgaccaagacctctgtggactgtacaatgtatatctgtggagacagcacagagtgtagcaacctgctgctccaatatggctccttctgtacccaacttaacagggctctgacaggcattgctgtggaacaggacaagaacacccaggaggtgtttgcccaggtgaagcagatttacaagacacctccaatcaaggactttggaggcttcaacttcagccagattctgcctgacccaagcaagccaagcaagaggtccttcattgaggacctgctgttcaacaaggtgaccctggctgatgctggcttcatcaagcaatatggagactgtctgggagacattgctgccagggacctgatttgtgcccagaagttcaatggactgacagtgctgcctccactgctgacagatgagatgattgcccaatacacctctgccctgctggctggcaccatcacctctggctggacctttggagcaggagcagccctccaaatcccatttgctatgcagatggcttacaggttcaatggcattggagtgacccagaatgtgctctatgagaaccagaaactgattgccaaccagttcaactctgccattggcaagattcaggactccctgtccagcacagcctctgccctgggcaaactccaagatgtggtgaaccagaatgcccaggctctgaacaccctggtgaagcaactttccagcaactttggagccatctcctctgtgctgaatgacatcctgagcagactggaccctcccgaggctgaggtccagattgacagactgattacaggcagactccaatccctccaaacctatgtgacccaacaacttatcagggctgctgagattagggcatctgccaacctggctgccaccaagatgagtgagtgtgtgctgggacaaagcaagagggtggacttctgtggcaagggctaccacctgatgagttttccacagtctgcccctcatggagtggtgttcctgcatgtgacctatgtgcctgcccaggagaagaacttcaccacagcccctgccatctgccatgatggcaaggctcactttccaagggagggagtgtttgtgagcaatggcacccactggtttgtgacccagaggaacttctatgaaccacagattatcaccacagacaacacctttgtgtctggcaactgtgatgtggtgattggcattgtgaacaacacagtctatgacccactccaacctgaactggactccttcaaggaggaactggacaaatacttcaagaaccacaccagccctgatgtggacctgggagacatctctggcatcaatgcctctgtggtgaacatccagaaggagattgacagactgaatgaggtggctaagaacctgaatgagtccctgattgacctccaagaactgggcaaaggcggaggcagcgggtatattccggaggctccaagagacggtcaggcgtacgtacggaaggacggcgaatgggttctcttgagcactttcttaggccatcatcatcaccaccatatgaaggacaacacagtcccgctgaaacttattgcgcttctcgcaaatggagagttccactctggagagcaactcggcgagaccctgggaatgagtcgggcggctatcaacaagcatatacagactttgagggattggggtgtggatgtcttcactgttccgggtaagggctattcactgcccgaaccgatccaacttctcaatgccaaacagatattggggcaacttgatggtggctctgtcgccgtgttgccggtcatcgatagcacgaaccaatatctcttggaccgcatcggagaactcaagagcggagacgcatgtatagcggaatatcagcaagccggtagaggaagaaggggacggaaatggttctctccattcggagccaacctgtatttgagcatgttctggcgattggagcagggaccagccgccgccatcggtctctctcttgtcataggtattgtcatggcggaagtcctccgcaaactcggggccgacaaagtacgcgtgaaatggccgaacgacctctatcttcaggataggaaattggcagggatattggttgaactgacgggtaagacgggggacgccgctcagattgttataggtgccggaataaacatggccatgcgcagagttgaagagtcagtggtaaaccagggttggatcactctccaagaggcgggaataaacctggatcgcaacacactggctgccatgcttatacgggaactccgagctgcattggaactgttcgagcaagaagggcttgctccgtacttgagcaggtgggaaaagctggataatttcataaatcgccctgttaaactcatcatcggagataaagagatttttggcataagtcgaggaatcgataaacaaggtgcattgctgcttgagcaagacggtataatcaaaccttggatgggtggcgaaatctcacttagaagcgcggaaaaatatgaacaaggcagtggagagggcagaggaagtctgctaacatgcggtgacgtcgaggagaatcctggcccaatgagtaaaggagaagctgtgattaaagagttcatgcgcttcaaagttcacatggagggttctatgaacggtcacgagttcgagatcgaaggcgaaggcgagggccgtccgtatgaaggcacccagaccgccaaactgaaagtgactaaaggcggcccgctgcctttttcctgggacatcctgagcccgcaatttatgtacggttctagggcgttcaccaaacacccagcggatatcccggactattataagcagtcttttccggaaggtttcaagtgggaacgcgtaatgaattttgaagatggtggtgccgtgaccgtcactcaggacacctccctggaggatggcaccctgatctataaagttaaactgcgtggtactaattttccacctgatggcccggtgatgcagaaaaagacgatgggttgggaggcgtctaccgaacgcttgtatccggaagatggtgtgctgaaaggcgacattaaaatggccctgcgcctgaaagatggcggccgctatctggctgacttcaaaaccacgtacaaagccaagaaacctgtgcagatgcctggcgcgtacaatgtggaccgcaaactggacatcacctctcataatgaagattatacggtggtagagcaatatgagcgctccgagggtcgtcattctaccggtggcatggatgaactatacaaataagtttaaacccgctgatcagcctcgactgtgccttctagttgccagccatctgttgtttgcccctcccccgtgccttccttgaccctggaaggtgccactcccactgtcctttcctaataaaatgaggaaattgcatcgcattgtctgagtaggtgtcattctattctggggggtggggtggggcaggacagcaagggggaggattgggaagacaatagcaggcatgctggggatgcggtgggctctatggcttctgaggcggaaagaaccagctggggctctagggggtatccccacgcgccctgtagcggcgcattaagcgcggcgggtgtggtggttacgcgcagcgtgaccgctacacttgccagcgccctagcgcccgctcctttcgctttcttcccttcctttctcgccacgttcgccggctttccccgtcaagctctaaatcgggggctccctttagggttccgatttagtgctttacggcacctcgaccccaaaaaacttgattagggtgatggttcacgtagtgggccatcgccctgatagacggtttttcgccctttgacgttggagtccacgttctttaatagtggactcttgttccaaactggaacaacactcaaccctatctcggtctattcttttgatttataagggattttgccgatttcggcctattggttaaaaaatgagctgatttaacaaaaatttaacgcgaattaattctgtggaatgtgtgtcagttagggtgtggaaagtccccaggctccccagcaggcagaagtatgcaaagcatgcatctcaattagtcagcaaccaggtgtggaaagtccccaggctccccagcaggcagaagtatgcaaagcatgcatctcaattagtcagcaaccatagtcccgcccctaactccgcccatcccgcccctaactccgcccagttccgcccattctccgccccatggctgactaattttttttatttatgcagaggccgaggccgcctctgcctctgagctattccagaagtagtgaggaggcttttttggaggcctaggcttttgcaaaaagctcccgggagcttgtatatccattttcggatctgatcaagagacaggatgaggatcgtttcgcatgattgaacaagatggattgcacgcaggttctccggccgcttgggtggagaggctattcggctatgactgggcacaacagacaatcggctgctctgatgccgccgtgttccggctgtcagcgcaggggcgcccggttctttttgtcaagaccgacctgtccggtgccctgaatgaactgcaggacgaggcagcgcggctatcgtggctggccacgacgggcgttccttgcgcagctgtgctcgacgttgtcactgaagcgggaagggactggctgctattgggcgaagtgccggggcaggatctcctgtcatctcaccttgctcctgccgagaaagtatccatcatggctgatgcaatgcggcggctgcatacgcttgatccggctacctgcccattcgaccaccaagcgaaacatcgcatcgagcgagcacgtactcggatggaagccggtcttgtcgatcaggatgatctggacgaagagcatcaggggctcgcgccagccgaactgttcgccaggctcaaggcgcgcatgcccgacggcgaggatctcgtcgtgacccatggcgatgcctgcttgccgaatatcatggtggaaaatggccgcttttctggattcatcgactgtggccggctgggtgtggcggaccgctatcaggacatagcgttggctacccgtgatattgctgaagagcttggcggcgaatgggctgaccgcttcctcgtgctttacggtatcgccgctcccgattcgcagcgcatcgccttctatcgccttcttgacgagttcttctgagcgggactctggggttcgaaatgaccgaccaagcgacgcccaacctgccatcacgagatttcgattccaccgccgccttctatgaaaggttgggcttcggaatcgttttccgggacgccggctggatgatcctccagcgcggggatctcatgctggagttcttcgcccaccccaacttgtttattgcagcttataatggttacaaataaagcaatagcatcacaaatttcacaaataaagcatttttttcactgcattctagttgtggtttgtccaaactcatcaatgtatcttatcatgtctgtataccgtcgacctctagctagagcttggcgtaatcatggtcatagctgtttcctgtgtgaaattgttatccgctcacaattccacacaacatacgagccggaagcataaagtgtaaagcctggggtgcctaatgagtgagctaactcacattaattgcgttgcgctcactgcccgctttccagtcgggaaacctgtcgtgccagctgcattaatgaatcggccaacgcgcggggagaggcggtttgcgtattgggcgctcttccgcttcctcgctcactgactcgctgcgctcggtcgttcggctgcggcgagcggtatcagctcactcaaaggcggtaatacggttatccacagaatcaggggataacgcaggaaagaacatgtgagcaaaaggccagcaaaaggccaggaaccgtaaaaaggccgcgttgctggcgtttttccataggctccgcccccctgacgagcatcacaaaaatcgacgctcaagtcagaggtggcgaaacccgacaggactataaagataccaggcgtttccccctggaagctccctcgtgcgctctcctgttccgaccctgccgcttaccggatacctgtccgcctttctcccttcgggaagcgtggcgctttctcatagctcacgctgtaggtatctcagttcggtgtaggtcgttcgctccaagctgggctgtgtgcacgaaccccccgttcagcccgaccgctgcgccttatccggtaactatcgtcttgagtccaacccggtaagacacgacttatcgccactggcagcagccactggtaacaggattagcagagcgaggtatgtaggcggtgctacagagttcttgaagtggtggcctaactacggctacactagaagaacagtatttggtatctgcgctctgctgaagccagttaccttcggaaaaagagttggtagctcttgatccggcaaacaaaccaccgctggtagcggtttttttgtttgcaagcagcagattacgcgcagaaaaaaaggatctcaagaagatcctttgatcttttctacggggtctgacgctcagtggaacgaaaactcacgttaagggattttggtcatgagattatcaaaaaggatcttcacctagatccttttaaattaaaaatgaagttttaaatcaatctaaagtatatatgagtaaacttggtctgacagttaccaatgcttaatcagtgaggcacctatctcagcgatctgtctatttcgttcatccatagttgcctgactccccgtcgtgtagataactacgatacgggagggcttaccatctggccccagtgctgcaatgataccgcgagacccacgctcaccggctccagatttatcagcaataaaccagccagccggaagggccgagcgcagaagtggtcctgcaactttatccgcctccatccagtctattaattgttgccgggaagctagagtaagtagttcgccagttaatagtttgcgcaacgttgttgccattgctacaggcatcgtggtgtcacgctcgtcgtttggtatggcttcattcagctccggttcccaacgatcaaggcgagttacatgatcccccatgttgtgcaaaaaagcggttagctccttcggtcctccgatcgttgtcagaagtaagttggccgcagtgttatcactcatggttatggcagcactgcataattctcttactgtcatgccatccgtaagatgcttttctgtgactggtgagtactcaaccaagtcattctgagaatagtgtatgcggcgaccgagttgctcttgcccggcgtcaatacgggataataccgcgccacatagcagaactttaaaagtgctcatcattggaaaacgttcttcggggcgaaaactctcaaggatcttaccgctgttgagatccagttcgatgtaacccactcgtgcacccaactgatcttcagcatcttttactttcaccagcgtttctgggtgagcaaaaacaggaaggcaaaatgccgcaaaaaagggaataagggcgacacggaaatgttgaatactcatactcttcctttttcaatattattgaagcatttatcagggttattgtctcatgagcggatacatatttgaatgtatttagaaaaataaacaaataggggttccgcgcacatttccccgaaaagtgccacctgacgtc

SEQ ID NO: 117 - DNA, 11108 bp, synthetic construct
  misc_feature 1..11108: note pMD140-pcDNA3.1-SARS2_mut_v3-GGSG-foldon-G-6xHis-BirA-T2A-m Scarlet
  source 1..11108: mol_type = other DNA
gacggatcgggagatctcccgatcccctatggtgcactctcagtacaatctgctctgatgccgcatagttaagccagtatctgctccctgcttgtgtgttggaggtcgctgagtagtgcgcgagcaaaatttaagctacaacaaggcaaggcttgaccgacaattgcatgaagaatctgcttagggttaggcgttttgcgctgcttcgcgatgtacgggccagatatacgcgttgacattgattattgactagttattaatagtaatcaattacggggtcattagttcatagcccatatatggagttccgcgttacataacttacggtaaatggcccgcctggctgaccgcccaacgacccccgcccattgacgtcaataatgacgtatgttcccatagtaacgccaatagggactttccattgacgtcaatgggtggagtatttacggtaaactgcccacttggcagtacatcaagtgtatcatatgccaagtacgccccctattgacgtcaatgacggtaaatggcccgcctggcattatgcccagtacatgaccttatgggactttcctacttggcagtacatctacgtattagtcatcgctattaccatggtgatgcggttttggcagtacatcaatgggcgtggatagcggtttgactcacggggatttccaagtctccaccccattgacgtcaatgggagtttgttttggcaccaaaatcaacgggactttccaaaatgtcgtaacaactccgccccattgacgcaaatgggcggtaggcgtgtacggtgggaggtctatataagcagagctctctggctaactagagaacccactgcttactggcttatcgaaattaatacgactcactatagggagacccaagctggatgtttgtgttcctggtgctgctgccactggtgtccagccagtgtgtgaacctgaccaccaggacccaacttcctcctgcctacaccaactccttcaccaggggagtctactaccctgacaaggtgttcaggtcctctgtgctgcacagcacccaggacctgttcctgccattcttcagcaatgtgacctggttccatgccatccatgtgtctggcaccaatggcaccaagaggtttgacaaccctgtgctgccattcaatgatggagtctactttgccagcacagagaagagcaacatcatcaggggctggatttttggcaccaccctggacagcaagacccagtccctgctgattgtgaacaatgccaccaatgtggtgattaaggtgtgtgagttccagttctgtaatgacccattcctgggagtctactaccacaagaacaacaagtcctggatggagtctgagttcagggtctactcctctgccaacaactgtacctttgaatatgtgagccaaccattcctgatggacttggagggcaagcagggcaacttcaagaacctgagggagtttgtgttcaagaacattgatggctacttcaagatttacagcaaacacacaccaatcaacctggtgagggacctgccacagggcttctctgccttggaaccactggtggacctgccaattggcatcaacatcaccaggttccagaccctgctggctctgcacaggtcctacctgacacctggagactcctcctctggctggacagcaggagcagcagcctactatgtgggctacctccaaccaaggaccttcctgctgaaatacaatgagaatggcaccatcacagatgctgagggcaagcagggcaacttcaagaacctgagggagtttgtgttcaagaacattgatggctacttcaagatttacagcaaacacacaccaatcaacctggtgagggacctgccacagggcttctctgccttggaaccactggtggacctgccaattggcatcaacatcaccaggttccagaccctgctggctctgcacaggtcctacctgacacctggagactcctcctctggctggacagcaggagcagcagcctactatgtgggctacctccaaccaaggaccttcctgctgaaatacaatgagaatggcaccatcacagatgctgtggactgtgccctggacccactgtctgagaccaagtgtaccctgaaatccttcacagtggagaagggcatctaccagaccagcaacttcagggtccaaccaacagagagcattgtgaggtttccaaacatcaccaacctgtgtccatttggagaggtgttcaatgccaccaggtttgcctctgtctatgcctggaacaggaagaggattagcaactgtgtggctgactactctgtgctctacaactctgcctccttcagcaccttcaagtgttatggagtgagcccaaccaaactgaatgacctgtgtttcaccaatgtctatgctgactcctttgtgattaggggagatgaggtgagacagattgcccctggacaaacaggcaagattgctgactacaactacaaactgcctgatgacttcacaggctgtgtgattgcctggaacagcaacaacctggacagcaaggtgggaggcaactacaactacctctacagactgttcaggaagagcaacctgaaaccatttgagagggacatcagcacagagatttacgctgctggcagcacaccatgtaatggagtggagggcgccgcttgttactttccactccaatcctatggcttccaaccaaccaatggagtgggctaccaaccatacagggtggtggtgctgtcctttgaactgctccatgcccctgccacagtgtgtggaccaaagaagagcaccaacctggtgaagaacaagtgtgtgaacttcaacttcaatggactgacaggcacaggagtgctgacagagagcaacaagaagttcctgccattccaacagtttggcagggacattgctgacaccacagatgctgtgagggacccacagaccttggagattctggacatcacaccatgttcctttggaggagtgtctgtgattacacctggcaccaacaccagcaaccaggtggctgtgctctaccaggatgtgaactgtactgaggtgcctgtggctatccatgctgaccaacttacaccaacctggagggtctacagcacaggcagcaatgtgttccagaccagggctggctgtctgattggagcagagcatgtgaacaactcctatgagtgtgacatcccaattggagcaggcatctgtgcctcctaccagacccagaccaacagcccaaggagggcaaggtctgtggcaagccagagcatcattgcctacacaatgagtctgggagcagagaactctgtggcttacagcaacaacagcattgccatcccaaccaacttcaccatctctgtgaccacagagattctgcctgtgagtatgaccaagacctctgtggactgtacaatgtatatctgtggagacagcacagagtgtagcaacctgctgctccaatatggctccttctgtacccaacttaacagggctctgacaggcattgctgtggaacaggacaagaacacccaggaggtgtttgcccaggtgaagcagatttacaagacacctccaatcaaggactttggaggcttcaacttcagccagattctgcctgacccaagcaagccaagcaagaggtccttcattgaggacctgctgttcaacaaggtgaccctggctgatgctggcttcatcaagcaatatggagactgtctgggagacattgctgccagggacctgatttgtgcccagaagttcaatggactgacagtgctgcctccactgctgacagatgagatgattgcccaatacacctctgccctgctggctggcaccatcacctctggctggacctttggagcaggagcagccctccaaatcccatttgctatgcagatggcttacaggttcaatggcattggagtgacccagaatgtgctctatgagaaccagaaactgattgccaaccagttcaactctgccattggcaagattcaggactccctgtccagcacagcctctgccctgggcaaactccaagatgtggtgaaccagaatgcccaggctctgaacaccctggtgaagcaactttccagcaactttggagccatctcctctgtgctgaatgacatcctgagcagactggaccctcccgaggctgaggtccagattgacagactgattacaggcagactccaatccctccaaacctatgtgacccaacaacttatcagggctgctgagattagggcatctgccaacctggctgccaccaagatgagtgagtgtgtgctgggacaaagcaagagggtggacttctgtggcaagggctaccacctgatgagttttccacagtctgcccctcatggagtggtgttcctgcatgtgacctatgtgcctgcccaggagaagaacttcaccacagcccctgccatctgccatgatggcaaggctcactttccaagggagggagtgtttgtgagcaatggcacccactggtttgtgacccagaggaacttctatgaaccacagattatcaccacagacaacacctttgtgtctggcaactgtgatgtggtgattggcattgtgaacaacacagtctatgacccactccaacctgaactggactccttcaaggaggaactggacaaatacttcaagaaccacaccagccctgatgtggacctgggagacatctctggcatcaatgcctctgtggtgaacatccagaaggagattgacagactgaatgaggtggctaagaacctgaatgagtccctgattgacctccaagaactgggcaaaggcggaggcagcgggtatattccggaggctccaagagacggtcaggcgtacgtacggaaggacggcgaatgggttctcttgagcactttcttaggccatcatcatcaccaccatatgaaggacaacacagtcccgctgaaacttattgcgcttctcgcaaatggagagttccactctggagagcaactcggcgagaccctgggaatgagtcgggcggctatcaacaagcatatacagactttgagggattggggtgtggatgtcttcactgttccgggtaagggctattcactgcccgaaccgatccaacttctcaatgccaaacagatattggggcaacttgatggtggctctgtcgccgtgttgccggtcatcgatagcacgaaccaatatctcttggaccgcatcggagaactcaagagcggagacgcatgtatagcggaatatcagcaagccggtagaggaagaaggggacggaaatggttctctccattcggagccaacctgtatttgagcatgttctggcgattggagcagggaccagccgccgccatcggtctctctcttgtcataggtattgtcatggcggaagtcctccgcaaactcggggccgacaaagtacgcgtgaaatggccgaacgacctctatcttcaggataggaaattggcagggatattggttgaactgacgggtaagacgggggacgccgctcagattgttataggtgccggaataaacatggccatgcgcagagttgaagagtcagtggtaaaccagggttggatcactctccaagaggcgggaataaacctggatcgcaacacactggctgccatgcttatacgggaactccgagctgcattggaactgttcgagcaagaagggcttgctccgtacttgagcaggtgggaaaagctggataatttcataaatcgccctgttaaactcatcatcggagataaagagatttttggcataagtcgaggaatcgataaacaaggtgcattgctgcttgagcaagacggtataatcaaaccttggatgggtggcgaaatctcacttagaagcgcggaaaaatatgaacaaggcagtggagagggcagaggaagtctgctaacatgcggtgacgtcgaggagaatcctggcccaatgagtaaaggagaagctgtgattaaagagttcatgcgcttcaaagttcacatggagggttctatgaacggtcacgagttcgagatcgaaggcgaaggcgagggccgtccgtatgaaggcacccagaccgccaaactgaaagtgactaaaggcggcccgctgcctttttcctgggacatcctgagcccgcaatttatgtacggttctagggcgttcaccaaacacccagcggatatcccggactattataagcagtcttttccggaaggtttcaagtgggaacgcgtaatgaattttgaagatggtggtgccgtgaccgtcactcaggacacctccctggaggatggcaccctgatctataaagttaaactgcgtggtactaattttccacctgatggcccggtgatgcagaaaaagacgatgggttgggaggcgtctaccgaacgcttgtatccggaagatggtgtgctgaaaggcgacattaaaatggccctgcgcctgaaagatggcggccgctatctggctgacttcaaaaccacgtacaaagccaagaaacctgtgcagatgcctggcgcgtacaatgtggaccgcaaactggacatcacctctcataatgaagattatacggtggtagagcaatatgagcgctccgagggtcgtcattctaccggtggcatggatgaactatacaaataagtttaaacccgctgatcagcctcgactgtgccttctagttgccagccatctgttgtttgcccctcccccgtgccttccttgaccctggaaggtgccactcccactgtcctttcctaataaaatgaggaaattgcatcgcattgtctgagtaggtgtcattctattctggggggtggggtggggcaggacagcaagggggaggattgggaagacaatagcaggcatgctggggatgcggtgggctctatggcttctgaggcggaaagaaccagctggggctctagggggtatccccacgcgccctgtagcggcgcattaagcgcggcgggtgtggtggttacgcgcagcgtgaccgctacacttgccagcgccctagcgcccgctcctttcgctttcttcccttcctttctcgccacgttcgccggctttccccgtcaagctctaaatcgggggctccctttagggttccgatttagtgctttacggcacctcgaccccaaaaaacttgattagggtgatggttcacgtagtgggccatcgccctgatagacggtttttcgccctttgacgttggagtccacgttctttaatagtggactcttgttccaaactggaacaacactcaaccctatctcggtctattcttttgatttataagggattttgccgatttcggcctattggttaaaaaatgagctgatttaacaaaaatttaacgcgaattaattctgtggaatgtgtgtcagttagggtgtggaaagtccccaggctccccagcaggcagaagtatgcaaagcatgcatctcaattagtcagcaaccaggtgtggaaagtccccaggctccccagcaggcagaagtatgcaaagcatgcatctcaattagtcagcaaccatagtcccgcccctaactccgcccatcccgcccctaactccgcccagttccgcccattctccgccccatggctgactaattttttttatttatgcagaggccgaggccgcctctgcctctgagctattccagaagtagtgaggaggcttttttggaggcctaggcttttgcaaaaagctcccgggagcttgtatatccattttcggatctgatcaagagacaggatgaggatcgtttcgcatgattgaacaagatggattgcacgcaggttctccggccgcttgggtggagaggctattcggctatgactgggcacaacagacaatcggctgctctgatgccgccgtgttccggctgtcagcgcaggggcgcccggttctttttgtcaagaccgacctgtccggtgccctgaatgaactgcaggacgaggcagcgcggctatcgtggctggccacgacgggcgttccttgcgcagctgtgctcgacgttgtcactgaagcgggaagggactggctgctattgggcgaagtgccggggcaggatctcctgtcatctcaccttgctcctgccgagaaagtatccatcatggctgatgcaatgcggcggctgcatacgcttgatccggctacctgcccattcgaccaccaagcgaaacatcgcatcgagcgagcacgtactcggatggaagccggtcttgtcgatcaggatgatctggacgaagagcatcaggggctcgcgccagccgaactgttcgccaggctcaaggcgcgcatgcccgacggcgaggatctcgtcgtgacccatggcgatgcctgcttgccgaatatcatggtggaaaatggccgcttttctggattcatcgactgtggccggctgggtgtggcggaccgctatcaggacatagcgttggctacccgtgatattgctgaagagcttggcggcgaatgggctgaccgcttcctcgtgctttacggtatcgccgctcccgattcgcagcgcatcgccttctatcgccttcttgacgagttcttctgagcgggactctggggttcgaaatgaccgaccaagcgacgcccaacctgccatcacgagatttcgattccaccgccgccttctatgaaaggttgggcttcggaatcgttttccgggacgccggctggatgatcctccagcgcggggatctcatgctggagttcttcgcccaccccaacttgtttattgcagcttataatggttacaaataaagcaatagcatcacaaatttcacaaataaagcatttttttcactgcattctagttgtggtttgtccaaactcatcaatgtatcttatcatgtctgtataccgtcgacctctagctagagcttggcgtaatcatggtcatagctgtttcctgtgtgaaattgttatccgctcacaattccacacaacatacgagccggaagcataaagtgtaaagcctggggtgcctaatgagtgagctaactcacattaattgcgttgcgctcactgcccgctttccagtcgggaaacctgtcgtgccagctgcattaatgaatcggccaacgcgcggggagaggcggtttgcgtattgggcgctcttccgcttcctcgctcactgactcgctgcgctcggtcgttcggctgcggcgagcggtatcagctcactcaaaggcggtaatacggttatccacagaatcaggggataacgcaggaaagaacatgtgagcaaaaggccagcaaaaggccaggaaccgtaaaaaggccgcgttgctggcgtttttccataggctccgcccccctgacgagcatcacaaaaatcgacgctcaagtcagaggtggcgaaacccgacaggactataaagataccaggcgtttccccctggaagctccctcgtgcgctctcctgttccgaccctgccgcttaccggatacctgtccgcctttctcccttcgggaagcgtggcgctttctcatagctcacgctgtaggtatctcagttcggtgtaggtcgttcgctccaagctgggctgtgtgcacgaaccccccgttcagcccgaccgctgcgccttatccggtaactatcgtcttgagtccaacccggtaagacacgacttatcgccactggcagcagccactggtaacaggattagcagagcgaggtatgtaggcggtgctacagagttcttgaagtggtggcctaactacggctacactagaagaacagtatttggtatctgcgctctgctgaagccagttaccttcggaaaaagagttggtagctcttgatccggcaaacaaaccaccgctggtagcggtttttttgtttgcaagcagcagattacgcgcagaaaaaaaggatctcaagaagatcctttgatcttttctacggggtctgacgctcagtggaacgaaaactcacgttaagggattttggtcatgagattatcaaaaaggatcttcacctagatccttttaaattaaaaatgaagttttaaatcaatctaaagtatatatgagtaaacttggtctgacagttaccaatgcttaatcagtgaggcacctatctcagcgatctgtctatttcgttcatccatagttgcctgactccccgtcgtgtagataactacgatacgggagggcttaccatctggccccagtgctgcaatgataccgcgagacccacgctcaccggctccagatttatcagcaataaaccagccagccggaagggccgagcgcagaagtggtcctgcaactttatccgcctccatccagtctattaattgttgccgggaagctagagtaagtagttcgccagttaatagtttgcgcaacgttgttgccattgctacaggcatcgtggtgtcacgctcgtcgtttggtatggcttcattcagctccggttcccaacgatcaaggcgagttacatgatcccccatgttgtgcaaaaaagcggttagctccttcggtcctccgatcgttgtcagaagtaagttggccgcagtgttatcactcatggttatggcagcactgcataattctcttactgtcatgccatccgtaagatgcttttctgtgactggtgagtactcaaccaagtcattctgagaatagtgtatgcggcgaccgagttgctcttgcccggcgtcaatacgggataataccgcgccacatagcagaactttaaaagtgctcatcattggaaaacgttcttcggggcgaaaactctcaaggatcttaccgctgttgagatccagttcgatgtaacccactcgtgcacccaactgatcttcagcatcttttactttcaccagcgtttctgggtgagcaaaaacaggaaggcaaaatgccgcaaaaaagggaataagggcgacacggaaatgttgaatactcatactcttcctttttcaatattattgaagcatttatcagggttattgtctcatgagcggatacatatttgaatgtatttagaaaaataaacaaataggggttccgcgcacatttccccgaaaagtgccacctgacgtc

SEQ ID NO: 118 - DNA, 11108 bp, synthetic construct
  misc_feature 1..11108: note pMD141-pcDNA3.1-SARS2_mut_v4-GGSG-foldon-G-6xHis-BirA-T2A-m Scarlet
  source 1..11108: mol_type = other DNA
gacggatcgggagatctcccgatcccctatggtgcactctcagtacaatctgctctgatgccgcatagttaagccagtatctgctccctgcttgtgtgttggaggtcgctgagtagtgcgcgagcaaaatttaagctacaacaaggcaaggcttgaccgacaattgcatgaagaatctgcttagggttaggcgttttgcgctgcttcgcgatgtacgggccagatatacgcgttgacattgattattgactagttattaatagtaatcaattacggggtcattagttcatagcccatatatggagttccgcgttacataacttacggtaaatggcccgcctggctgaccgcccaacgacccccgcccattgacgtcaataatgacgtatgttcccatagtaacgccaatagggactttccattgacgtcaatgggtggagtatttacggtaaactgcccacttggcagtacatcaagtgtatcatatgccaagtacgccccctattgacgtcaatgacggtaaatggcccgcctggcattatgcccagtacatgaccttatgggactttcctacttggcagtacatctacgtattagtcatcgctattaccatggtgatgcggttttggcagtacatcaatgggcgtggatagcggtttgactcacggggatttccaagtctccaccccattgacgtcaatgggagtttgttttggcaccaaaatcaacgggactttccaaaatgtcgtaacaactccgccccattgacgcaaatgggcggtaggcgtgtacggtgggaggtctatataagcagagctctctggctaactagagaacccactgcttactggcttatcgaaattaatacgactcactatagggagacccaagctggatgtttgtgttcctggtgctgctgccactggtgtccagccagtgtgtgaacctgaccaccaggacccaacttcctcctgcctacaccaactccttcaccaggggagtctactaccctgacaaggtgttcaggtcctctgtgctgcacagcacccaggacctgttcctgccattcttcagcaatgtgacctggttccatgccatccatgtgtctggcaccaatggcaccaagaggtttgacaaccctgtgctgccattcaatgatggagtctactttgccagcacagagaagagcaacatcatcaggggctggatttttggcaccaccctggacagcaagacccagtccctgctgattgtgaacaatgccaccaatgtggtgattaaggtgtgtgagttccagttctgtaatgacccattcctgggagtctactaccacaagaacaacaagtcctggatggagtctgagttcagggtctactcctctgccaacaactgtacctttgaatatgtgagccaaccattcctgatggacttggagggcaagcagggcaacttcaagaacctgagggagtttgtgttcaagaacattgatggctacttcaagatttacagcaaacacacaccaatcaacctggtgagggacctgccacagggcttctctgccttggaaccactggtggacctgccaattggcatcaacatcaccaggttccagaccctgctggctctgcacaggtcctacctgacacctggagactcctcctctggctggacagcaggagcagcagcctactatgtgggctacctccaaccaaggaccttcctgctgaaatacaatgagaatggcaccatcacagatgctgagggcaagcagggcaacttcaagaacctgagggagtttgtgttcaagaacattgatggctacttcaagatttacagcaaacacacaccaatcaacctggtgagggacctgccacagggcttctctgccttggaaccactggtggacctgccaattggcatcaacatcaccaggttccagaccctgctggctctgcacaggtcctacctgacacctggagactcctcctctggctggacagcaggagcagcagcctactatgtgggctacctccaaccaaggaccttcctgctgaaatacaatgagaatggcaccatcacagatgctgtggactgtgccctggacccactgtctgagaccaagtgtaccctgaaatccttcacagtggagaagggcatctaccagaccagcaacttcagggtccaaccaacagagagcattgtgaggtttccaaacatcaccaacctgtgtccatttggagaggtgttcaatgccaccaggtttgcctctgtctatgcctggaacaggaagaggattagcaactgtgtggctgactactctgtgctctacaactctgcctccttcagcaccttcaagtgttatggagtgagcccaaccaaactgaatgacctgtgtttcaccaatgtctatgctgactcctttgtgattaggggagatgaggtgagacagattgcccctggacaaacaggcgccattgctgactacaactacaaactgcctgatgacttcacaggctgtgtgattgcctggaacagcgccaacctggacagcaaggtgggaggcaacgccaactacctctacagagccgctaggaagagcaacctgaaaccatttgagagggacatcagcacagagattgccgctgctggcagcacaccatgtaatggagtggagggcgccgcttgttactttccactcgcctcctatggcttcgccccagctgccggagtgggctaccaaccatacagggtggtggtgctgtcctttgaactgctccatgcccctgccacagtgtgtggaccaaagaagagcaccaacctggtgaagaacaagtgtgtgaacttcaacgccaatggactgacaggcacaggagtgctgacagagagcaacaagaagttcctgccattccaacagtttggcagggacattgctgacaccacagatgctgtgagggacccacagaccttggagattctggacatcacaccatgttcctttggaggagtgtctgtgattacacctggcaccaacaccagcaaccaggtggctgtgctctaccaggatgtgaactgtactgaggtgcctgtggctatccatgctgaccaacttacaccaacctggagggtctacagcacaggcagcaatgtgttccagaccagggctggctgtctgattggagcagagcatgtgaacaactcctatgagtgtgacatcccaattggagcaggcatctgtgcctcctaccagacccagaccaacagcccaaggagggcaaggtctgtggcaagccagagcatcattgcctacacaatgagtctgggagcagagaactctgtggcttacagcaacaacagcattgccatcccaaccaacttcaccatctctgtgaccacagagattctgcctgtgagtatgaccaagacctctgtggactgtacaatgtatatctgtggagacagcacagagtgtagcaacctgctgctccaatatggctccttctgtacccaacttaacagggctctgacaggcattgctgtggaacaggacaagaacacccaggaggtgtttgcccaggtgaagcagatttacaagacacctccaatcaaggactttggaggcttcaacttcagccagattctgcctgacccaagcaagccaagcaagaggtccttcattgaggacctgctgttcaacaaggtgaccctggctgatgctggcttcatcaagcaatatggagactgtctgggagacattgctgccagggacctgatttgtgcccagaagttcaatggactgacagtgctgcctccactgctgacagatgagatgattgcccaatacacctctgccctgctggctggcaccatcacctctggctggacctttggagcaggagcagccctccaaatcccatttgctatgcagatggcttacaggttcaatggcattggagtgacccagaatgtgctctatgagaaccagaaactgattgccaaccagttcaactctgccattggcaagattcaggactccctgtccagcacagcctctgccctgggcaaactccaagatgtggtgaaccagaatgcccaggctctgaacaccctggtgaagcaactttccagcaactttggagccatctcctctgtgctgaatgacatcctgagcagactggaccctcccgaggctgaggtccagattgacagactgattacaggcagactccaatccctccaaacctatgtgacccaacaacttatcagggctgctgagattagggcatctgccaacctggctgccaccaagatgagtgagtgtgtgctgggacaaagcaagagggtggacttctgtggcaagggctaccacctgatgagttttccacagtctgcccctcatggagtggtgttcctgcatgtgacctatgtgcctgcccaggagaagaacttcaccacagcccctgccatctgccatgatggcaaggctcactttccaagggagggagtgtttgtgagcaatggcacccactggtttgtgacccagaggaacttctatgaaccacagattatcaccacagacaacacctttgtgtctggcaactgtgatgtggtgattggcattgtgaacaacacagtctatgacccactccaacctgaactggactccttcaaggaggaactggacaaatacttcaagaaccacaccagccctgatgtggacctgggagacatctctggcatcaatgcctctgtggtgaacatccagaaggagattgacagactgaatgaggtggctaagaacctgaatgagtccctgattgacctccaagaactgggcaaaggcggaggcagcgggtatattccggaggctccaagagacggtcaggcgtacgtacggaaggacggcgaatgggttctcttgagcactttcttaggccatcatcatcaccaccatatgaaggacaacacagtcccgctgaaacttattgcgcttctcgcaaatggagagttccactctggagagcaactcggcgagaccctgggaatgagtcgggcggctatcaacaagcatatacagactttgagggattggggtgtggatgtcttcactgttccgggtaagggctattcactgcccgaaccgatccaacttctcaatgccaaacagatattggggcaacttgatggtggctctgtcgccgtgttgccggtcatcgatagcacgaaccaatatctcttggaccgcatcggagaactcaagagcggagacgcatgtatagcggaatatcagcaagccggtagaggaagaaggggacggaaatggttctctccattcggagccaacctgtatttgagcatgttctggcgattggagcagggaccagccgccgccatcggtctctctcttgtcataggtattgtcatggcggaagtcctccgcaaactcggggccgacaaagtacgcgtgaaatggccgaacgacctctatcttcaggataggaaattggcagggatattggttgaactgacgggtaagacgggggacgccgctcagattgttataggtgccggaataaacatggccatgcgcagagttgaagagtcagtggtaaaccagggttggatcactctccaagaggcgggaataaacctggatcgcaacacactggctgccatgcttatacgggaactccgagctgcattggaactgttcgagcaagaagggcttgctccgtacttgagcaggtgggaaaagctggataatttcataaatcgccctgttaaactcatcatcggagataaagagatttttggcataagtcgaggaatcgataaacaaggtgcattgctgcttgagcaagacggtataatcaaaccttggatgggtggcgaaatctcacttagaagcgcggaaaaatatgaacaaggcagtggagagggcagaggaagtctgctaacatgcggtgacgtcgaggagaatcctggcccaatgagtaaaggagaagctgtgattaaagagttcatgcgcttcaaagttcacatggagggttctatgaacggtcacgagttcgagatcgaaggcgaaggcgagggccgtccgtatgaaggcacccagaccgccaaactgaaagtgactaaaggcggcccgctgcctttttcctgggacatcctgagcccgcaatttatgtacggttctagggcgttcaccaaacacccagcggatatcccggactattataagcagtcttttccggaaggtttcaagtgggaacgcgtaatgaattttgaagatggtggtgccgtgaccgtcactcaggacacctccctggaggatggcaccctgatctataaagttaaactgcgtggtactaattttccacctgatggcccggtgatgcagaaaaagacgatgggttgggaggcgtctaccgaacgcttgtatccggaagatggtgtgctgaaaggcgacattaaaatggccctgcgcctgaaagatggcggccgctatctggctgacttcaaaaccacgtacaaagccaagaaacctgtgcagatgcctggcgcgtacaatgtggaccgcaaactggacatcacctctcataatgaagattatacggtggtagagcaatatgagcgctccgagggtcgtcattctaccggtggcatggatgaactatacaaataagtttaaacccgctgatcagcctcgactgtgccttctagttgccagccatctgttgtttgcccctcccccgtgccttccttgaccctggaaggtgccactcccactgtcctttcctaataaaatgaggaaattgcatcgcattgtctgagtaggtgtcattctattctggggggtggggtggggcaggacagcaagggggaggattgggaagacaatagcaggcatgctggggatgcggtgggctctatggcttctgaggcggaaagaaccagctggggctctagggggtatccccacgcgccctgtagcggcgcattaagcgcggcgggtgtggtggttacgcgcagcgtgaccgctacacttgccagcgccctagcgcccgctcctttcgctttcttcccttcctttctcgccacgttcgccggctttccccgtcaagctctaaatcgggggctccctttagggttccgatttagtgctttacggcacctcgaccccaaaaaacttgattagggtgatggttcacgtagtgggccatcgccctgatagacggtttttcgccctttgacgttggagtccacgttctttaatagtggactcttgttccaaactggaacaacactcaaccctatctcggtctattcttttgatttataagggattttgccgatttcggcctattggttaaaaaatgagctgatttaacaaaaatttaacgcgaattaattctgtggaatgtgtgtcagttagggtgtggaaagtccccaggctccccagcaggcagaagtatgcaaagcatgcatctcaattagtcagcaaccaggtgtggaaagtccccaggctccccagcaggcagaagtatgcaaagcatgcatctcaattagtcagcaaccatagtcccgcccctaactccgcccatcccgcccctaactccgcccagttccgcccattctccgccccatggctgactaattttttttatttatgcagaggccgaggccgcctctgcctctgagctattccagaagtagtgaggaggcttttttggaggcctaggcttttgcaaaaagctcccgggagcttgtatatccattttcggatctgatcaagagacaggatgaggatcgtttcgcatgattgaacaagatggattgcacgcaggttctccggccgcttgggtggagaggctattcggctatgactgggcacaacagacaatcggctgctctgatgccgccgtgttccggctgtcagcgcaggggcgcccggttctttttgtcaagaccgacctgtccggtgccctgaatgaactgcaggacgaggcagcgcggctatcgtggctggccacgacgggcgttccttgcgcagctgtgctcgacgttgtcactgaagcgggaagggactggctgctattgggcgaagtgccggggcaggatctcctgtcatctcaccttgctcctgccgagaaagtatccatcatggctgatgcaatgcggcggctgcatacgcttgatccggctacctgcccattcgaccaccaagcgaaacatcgcatcgagcgagcacgtactcggatggaagccggtcttgtcgatcaggatgatctggacgaagagcatcaggggctcgcgccagccgaactgttcgccaggctcaaggcgcgcatgcccgacggcgaggatctcgtcgtgacccatggcgatgcctgcttgccgaatatcatggtggaaaatggccgcttttctggattcatcgactgtggccggctgggtgtggcggaccgctatcaggacatagcgttggctacccgtgatattgctgaagagcttggcggcgaatgggctgaccgcttcctcgtgctttacggtatcgccgctcccgattcgcagcgcatcgccttctatcgccttcttgacgagttcttctgagcgggactctggggttcgaaatgaccgaccaagcgacgcccaacctgccatcacgagatttcgattccaccgccgccttctatgaaaggttgggcttcggaatcgttttccgggacgccggctggatgatcctccagcgcggggatctcatgctggagttcttcgcccaccccaacttgtttattgcagcttataatggttacaaataaagcaatagcatcacaaatttcacaaataaagcatttttttcactgcattctagttgtggtttgtccaaactcatcaatgtatcttatcatgtctgtataccgtcgacctctagctagagcttggcgtaatcatggtcatagctgtttcctgtgtgaaattgttatccgctcacaattccacacaacatacgagccggaagcataaagtgtaaagcctggggtgcctaatgagtgagctaactcacattaattgcgttgcgctcactgcccgctttccagtcgggaaacctgtcgtgccagctgcattaatgaatcggccaacgcgcggggagaggcggtttgcgtattgggcgctcttccgcttcctcgctcactgactcgctgcgctcggtcgttcggctgcggcgagcggtatcagctcactcaaaggcggtaatacggttatccacagaatcaggggataacgcaggaaagaacatgtgagcaaaaggccagcaaaaggccaggaaccgtaaaaaggccgcgttgctggcgtttttccataggctccgcccccctgacgagcatcacaaaaatcgacgctcaagtcagaggtggcgaaacccgacaggactataaagataccaggcgtttccccctggaagctccctcgtgcgctctcctgttccgaccctgccgcttaccggatacctgtccgcctttctcccttcgggaagcgtggcgctttctcatagctcacgctgtaggtatctcagttcggtgtaggtcgttcgctccaagctgggctgtgtgcacgaaccccccgttcagcccgaccgctgcgccttatccggtaactatcgtcttgagtccaacccggtaagacacgacttatcgccactggcagcagccactggtaacaggattagcagagcgaggtatgtaggcggtgctacagagttcttgaagtggtggcctaactacggctacactagaagaacagtatttggtatctgcgctctgctgaagccagttaccttcggaaaaagagttggtagctcttgatccggcaaacaaaccaccgctggtagcggtttttttgtttgcaagcagcagattacgcgcagaaaaaaaggatctcaagaagatcctttgatcttttctacggggtctgacgctcagtggaacgaaaactcacgttaagggattttggtcatgagattatcaaaaaggatcttcacctagatccttttaaattaaaaatgaagttttaaatcaatctaaagtatatatgagtaaacttggtctgacagttaccaatgcttaatcagtgaggcacctatctcagcgatctgtctatttcgttcatccatagttgcctgactccccgtcgtgtagataactacgatacgggagggcttaccatctggccccagtgctgcaatgataccgcgagacccacgctcaccggctccagatttatcagcaataaaccagccagccggaagggccgagcgcagaagtggtcctgcaactttatccgcctccatccagtctattaattgttgccgggaagctagagtaagtagttcgccagttaatagtttgcgcaacgttgttgccattgctacaggcatcgtggtgtcacgctcgtcgtttggtatggcttcattcagctccggttcccaacgatcaaggcgagttacatgatcccccatgttgtgcaaaaaagcggttagctccttcggtcctccgatcgttgtcagaagtaagttggccgcagtgttatcactcatggttatggcagcactgcataattctcttactgtcatgccatccgtaagatgcttttctgtgactggtgagtactcaaccaagtcattctgagaatagtgtatgcggcgaccgagttgctcttgcccggcgtcaatacgggataataccgcgccacatagcagaactttaaaagtgctcatcattggaaaacgttcttcggggcgaaaactctcaaggatcttaccgctgttgagatccagttcgatgtaacccactcgtgcacccaactgatcttcagcatcttttactttcaccagcgtttctgggtgagcaaaaacaggaaggcaaaatgccgcaaaaaagggaataagggcgacacggaaatgttgaatactcatactcttcctttttcaatattattgaagcatttatcagggttattgtctcatgagcggatacatatttgaatgtatttagaaaaataaacaaataggggttccgcgcacatttccccgaaaagtgccacctgacgtc

SEQ ID NO: 119 - DNA, 8942 bp, synthetic construct
  misc_feature 1..8942: note = pMD142-MSCV-hACE2-T2A-BFP-3xFLAG
  source 1..8942: mol_type = other DNA
gaccccacctgtaggtttggcaagctagcttaagtaacgccattttgcaaggcatggaaaatacataactgagaatagagaagttcagatcaaggttaggaacagagagacagcagaatatgggccaaacaggatatctgtggtaagcagttcctgccccggctcagggccaagaacagatggtccccagatgcggtcccgccctcagcagtttctagagaaccatcagatgtttccagggtgccccaaggacctgaaatgaccctgtgccttatttgaactaaccaatcagttcgcttctcgcttctgttcgcgcgcttctgctccccgagctcaataaaagagcccacaacccctcactcggcgcgccagtcctccgatagactgcgtcgcccgggtacccgtattcccaataaagcctcttgctgtttgcatccgaatcgtggactcgctgatccttgggagggtctcctcagattgattgactgcccacctcgggggtctttcatttggaggttccaccgagatttggagacccctgcccagggaccaccgacccccccgccgggaggtaagctggccagcggtcgtttcgtgtctgtctctgtctttgtgcgtgtttgtgccggcatctaatgtttgcgcctgcgtctgtactagttagctaactagctctgtatctggcggacccgtggtggaactgacgagttctgaacacccggccgcaaccctgggagacgtcccagggactttgggggccgtttttgtggcccgacctgaggaagggagtcgatgtggaatccgaccccgtcaggatatgtggttctggtaggagacgagaacctaaaacagttcccgcctccgtctgaatttttgctttcggtttggaaccgaagccgcgcgtcttgtctgctgcagcgctgcagcatcgttctgtgttgtctctgtctgactgtgtttctgtatttgtctgaaaattagggccagactgttaccactcccttaagtttgaccttaggtcactggaaagatgtcgagcggatcgctcacaaccagtcggtagatgtcaagaagagacgttgggttaccttctgctctgcagaatggccaacctttaacgtcggatggccgcgagacggcacctttaaccgagacctcatcacccaggttaagatcaaggtcttttcacctggcccgcatggacacccagaccaggtcccctacatcgtgacctgggaagccttggcttttgacccccctccctgggtcaagccctttgtacaccctaagcctccgcctcctcttcctccatccgccccgtctctcccccttgaacctcctcgttcgaccccgcctcgatcctccctttatccagccctcactccttctctaggcgccggaattagatctctcgagatcgatgccttgagacaaatggcagtattcatccacaattttaaaagaaaaggggggattggggggtacagtgcaggggaaagaatagtagacataatagcaacagacatacaaactaaagaattacaaaaacaaattacaaaaattcaaaattttcgggtttattacagggacagcagagatccactttggcgccggctcgagggggcccggggaattcgctagctaggtcttgaaaggagtgggaattggctccggtgcccgtcagtgggcagagcgcacatcgcccacagtccccgagaagttggggggaggggtcggcaattgatccggtgcctagagaaggtggcgcggggtaaactgggaaagtgatgtcgtgtactggctccgcctttttcccgagggtgggggagaaccgtatataagtgcagtagtcgccgtgaacgttctttttcgcaacgggtttgccgccagaacacaggaccggttctagacgtacggccaccatgccactgctgctcttgctgcctctgctttgggctggagctctggctgattacaaggatgacgacgataagggtggaggcggtagccagtccaccattgaggaacaggccaagacatttttggacaagtttaaccacgaagccgaagacctgttctatcaaagttcacttgcttcttggaattataacaccaatattactgaagagaatgtccaaaacatgaataatgctggggacaaatggtctgcctttttaaaggaacagtccacacttgcccaaatgtatccactacaagaaattcagaatctcacagtcaagcttcagctgcaggctcttcagcaaaatgggtcttcagtgctctcagaagacaagagcaaacggttgaacacaattctaaatacaatgagcaccatctacagtactggaaaagtttgtaacccagataatccacaagaatgcttattacttgaaccaggtttgaatgaaataatggcaaacagtttagactacaatgagaggctctgggcttgggaaagctggagatctgaggtcggcaagcagctgaggccattatatgaagagtatgtggtcttgaaaaatgagatggcaagagcaaatcattatgaggactatggggattattggagaggagactatgaagtaaatggggtagatggctatgactacagccgcggccagttgattgaagatgtggaacatacctttgaagagattaaaccattatatgaacatcttcatgcctatgtgagggcaaagttgatgaatgcctatccttcctatatcagtccaattggatgcctccctgctcatttgcttggtgatatgtggggtagattttggacaaatctgtactctttgacagttccctttggacagaaaccaaacatagatgttactgatgcaatggtggaccaggcctgggatgcacagagaatattcaaggaggccgagaagttctttgtatctgttggtcttcctaatatgactcaaggattctgggaaaattccatgctaacggacccaggaaatgttcagaaagcagtctgccatcccacagcttgggacctggggaagggcgacttcaggatccttatgtgcacaaaggtgacaatggacgacttcctgacagctcatcatgagatggggcatatccagtatgatatggcatatgctgcacaaccttttctgctaagaaatggagctaatgaaggattccatgaagctgttggggaaatcatgtcactttctgcagccacacctaagcatttaaaatccattggtcttctgtcacccgattttcaagaagacaatgaaacagaaataaacttcctgctcaaacaagcactcacgattgttgggactctgccatttacttacatgttagagaagtggaggtggatggtctttaaaggggaaattcccaaagaccagtggatgaaaaagtggtgggagatgaagcgagagatagttggggtggtggaacctgtgccccatgatgaaacatactgtgaccccgcatctctgttccatgtttctaatgattactcattcattcgatattacacaaggaccctttaccaattccagtttcaagaagcactttgtcaagcagctaaacatgaaggccctctgcacaaatgtgacatctcaaactctacagaagctggacagaaactgttcaatatgctgaggcttggaaaatcagaaccctggaccctagcattggaaaatgttgtaggagcaaagaacatgaatgtaaggccactgctcaactactttgagcccttatttacctggctgaaagaccagaacaagaattcttttgtgggatggagtaccgactggagtccatatgcagaccaaagcatcaaagtgaggataagcctaaaatcagctcttggagataaagcatatgaatggaacgacaatgaaatgtacctgttccgatcatctgttgcatatgctatgaggcagtactttttaaaagtaaaaaatcagatgattctttttggggaggaggatgtgcgagtggctaatttgaaaccaagaatctcctttaatttctttgtcactgcacctaaaaatgtgtctgatatcattcctagaactgaagttgaaaaggccatcaggatgtcccggagccgtatcaatgatgctttccgtctgaatgacaacagcctagagtttctggggatacagccaacacttggacctcctaaccagccccctgtttccatatggctgattgtttttggagttgtgatgggagtgatagtggttggcattgtcatcctgatcttcactgggatcagagatcggaagaagaaaaataaagcaagaagtggagaaaatccttatgcctccatcgatattagcaaaggagaaaataatccaggattccaaaacactgatgatgttcagacctcctttttcgaaggatccggcgcaacaaacttctctctgctgaaacaagccggagatgtcgaagagaatcctggaccgatggtgtctaagggcgaagagctgattaaggagaacatgcacatgaagctgtacatggagggcaccgtggacaaccatcacttcaagtgcacatccgagggcgaaggcaagccctacgagggcacccagaccatgagaatcaaggtggtcgagggcggccctctccccttcgccttcgacatcctggctactagcttcctctacggcagcaagaccttcatcaaccacacccagggcatccccgacttcttcaagcagtccttccctgagggcttcacatgggagagagtcaccacatacgaagatgggggcgtgctgaccgctacccaggacaccagcctccaggacggctgcctcatctacaacgtcaagatcagaggggtgaacttcacatccaacggccctgtgatgcagaagaaaacactcggctgggaggccttcaccgagacgctgtaccccgctgacggcggcctggaaggcagaaacgacatggccctgaagctcgtgggcgggagccatctgatcgcaaacgccaagaccacatatagatccaagaaacccgctaagaacctcaagatgcctggcgtctactatgtggactacagactggaaagaatcaaggaggccaacaacgagacctacgtcgagcagcacgaggtggcagtggccagatactgcgacctccctagcaaactggggcacaagcttaatacgcgtgactacaaagaccatgacggtgattataaagatcatgacatcgattacaaggatgacgatgacaagtaaggatccaataaaagatctttattttcattagatctgtgtgttggttttttgtgtcgataaaataaaagattttatttagtctccagaaaaaggggggaatgaaagaccccacctgtaggtttggcaagctagcttaagtaacgccattttgcaaggcatggaaaatacataactgagaatagagaagttcagatcaaggttaggaacagagagacagcagaatatgggccaaacaggatatctgtggtaagcagttcctgccccggctcagggccaagaacagatggtccccagatgcggtcccgccctcagcagtttctagagaaccatcagatgtttccagggtgccccaaggacctgaaatgaccctgtgccttatttgaactaaccaatcagttcgcttctcgcttctgttcgcgcgcttctgctccccgagctcaataaaagagcccacaacccctcactcggcgcgccagtcctccgatagactgcgtcgcccgggtacccgtgtatccaataaaccctcttgcagttgcatccgacttgtggtctcgctgttccttgggagggtctcctctgagtgattgactacccgtcagcgggggtctttcatgggtaacagtttcttgaagttggagaacaacattctgagggtaggagtcgaatattaagtaatcctgactcaattagccactgttttgaatccacatactccaatactcctgaaatagttcattatggacagcgcagaaagagctggggagaattgtgaaattgttatccgctcacaattccacacaacatacgagccggaagcataaagtgtaaagcctggggtgcctaatgagtgagctaactcacattaattgcgttgcgctcactgcccgctttccagtcgggaaacctgtcgtgccagctgcattaatgaatcggccaacgcgcggggagaggcggtttgcgtattgggcgctcttccgcttcctcgctcactgactcgctgcgctcggtcgttcggctgcggcgagcggtatcagctcactcaaaggcggtaatacggttatccacagaatcaggggataacgcaggaaagaacatgtgagcaaaaggccagcaaaaggccaggaaccgtaaaaaggccgcgttgctggcgtttttccataggctccgcccccctgacgagcatcacaaaaatcgacgctcaagtcagaggtggcgaaacccgacaggactataaagataccaggcgtttccccctggaagctccctcgtgcgctctcctgttccgaccctgccgcttaccggatacctgtccgcctttctcccttcgggaagcgtggcgctttctcatagctcacgctgtaggtatctcagttcggtgtaggtcgttcgctccaagctgggctgtgtgcacgaaccccccgttcagcccgaccgctgcgccttatccggtaactatcgtcttgagtccaacccggtaagacacgacttatcgccactggcagcagccactggtaacaggattagcagagcgaggtatgtaggcggtgctacagagttcttgaagtggtggcctaactacggctacactagaagaacagtatttggtatctgcgctctgctgaagccagttaccttcggaaaaagagttggtagctcttgatccggcaaacaaaccaccgctggtagcggtggtttttttgtttgcaagcagcagattacgcgcagaaaaaaaggatctcaagaagatcctttgatcttttctacggggtctgacgctcagtggaacgaaaactcacgttaagggattttggtcatgagattatcaaaaaggatcttcacctagatccttttaaattaaaaatgaagttttaaatcaatctaaagtatatatgagtaaacttggtctgacagttaccaatgcttaatcagtgaggcacctatctcagcgatctgtctatttcgttcatccatagttgcctgactccccgtcgtgtagataactacgatacgggagggcttaccatctggccccagtgctgcaatgataccgcgagacccacgctcaccggctccagatttatcagcaataaaccagccagccggaagggccgagcgcagaagtggtcctgcaactttatccgcctccatccagtctattaattgttgccgggaagctagagtaagtagttcgccagttaatagtttgcgcaacgttgttgccattgctacaggcatcgtggtgtcacgctcgtcgtttggtatggcttcattcagctccggttcccaacgatcaaggcgagttacatgatcccccatgttgtgcaaaaaagcggttagctccttcggtcctccgatcgttgtcagaagtaagttggccgcagtgttatcactcatggttatggcagcactgcataattctcttactgtcatgccatccgtaagatgcttttctgtgactggtgagtactcaaccaagtcattctgagaatagtgtatgcggcgaccgagttgctcttgcccggcgtcaatacgggataataccgcgccacatagcagaactttaaaagtgctcatcattggaaaacgttcttcggggcgaaaactctcaaggatcttaccgctgttgagatccagttcgatgtaacccactcgtgcacccaactgatcttcagcatcttttactttcaccagcgtttctgggtgagcaaaaacaggaaggcaaaatgccgcaaaaaagggaataagggcgacacggaaatgttgaatactcatactcttcctttttcaatattattgaagcatttatcagggttattgtctcatgagcggatacatatttgaatgtatttagaaaaataaacaaataggggttccgcgcacatttccccgaaaagtgccacctgacgtctaagaaaccattattatcatgacattaacctataaaaataggcgtatcacgaggccctttcgtctcgcgcgtttcggtgatgacggtgaaaacctctgacacatgcagctcccggagacggtcacagcttgtctgtaagcggatgccgggagcagacaagcccgtcagggcgcgtcagcgggtgttggcgggtgtcggggctggcttaactatgcggcatcagagcagattgtactgagagtgcaccatatgcggtgtgaaataccgcacagatgcgtaaggagaaaataccgcatcaggcgccattcgccattcaggctgcgcaactgttgggaagggcgatcggtgcgggcctcttcgctattacgccagctggcgaaagggggatgtgctgcaaggcgattaagttgggtaacgccagggttttcccagtcacgacgttgtaaaacgacggcgcaaggaatggtgcatgcaaggagatggcgcccaacagtcccccggccacggggcctgccaccatacccacgccgaaacaagcgctcatgagcccgaagtggcgagcccgatcttccccatcggtgatgtcggcgatataggcgccagcaaccgcacctgtggcgccggtgatgccggccacgatgcgtccggcgtagaggcgattagtccaatttgttaaagacaggatatcagtggtccaggctctagttttgactcaacaatatcaccagctgaagcctatagagtacgagccatagataaaataaaagattttatttagtctccagaaaaaggggggaatgaaa

SEQ ID NO: 120 - DNA, 6380 bp, synthetic construct
  misc_feature 1..6380: note = pMD143-pAAV-EF1a-N protein-2A-Scarlet-FLAG-BGH
  source 1..6380: mol_type = other DNA
cctgcaggcagctgcgcgctcgctcgctcactgaggccgcccgggcaaagcccgggcgtcgggcgacctttggtcgcccggcctcagtgagcgagcgagcgcgcagagagggagtggccaactccatcactaggggttcctgcggccgcagctccggtgcccgtcagtgggcagagcgcacatcgcccacagtccccgagaagttggggggaggggtcggcaattgaaccggtgcctagagaaggtggcgcggggtaaactgggaaagtgatgtcgtgtactggctccgcctttttcccgagggtgggggagaaccgtatataagtgcagtagtcgccgtgaacgttctttttcgcaacgggtttgccgccagaacacaggtaagtgccgtgtgtggttcccgcgggcctggcctctttacgggttatggcccttgcgtgccttgaattacttccacgcccctggctgcagtacgtgattcttgatcccgagcttcgggttggaagtgggtgggagagttcgaggccttgcgcttaaggagccccttcgcctcgtgcttgagttgaggcctggcttgggcgctggggccgccgcgtgcgaatctggtggcaccttcgcgcctgtctcgctgctttcgataagtctctagccatttaaaatttttgatgacctgctgcgacgctttttttctggcaagatagtcttgtaaatgcgggccaagatctgcacactggtatttcggtttttggggccgcgggcggcgacggggcccgtgcgtcccagcgcacatgttcggcgaggcggggcctgcgagcgcggccaccgagaatcggacgggggtagtctcaagctggccggcctgctctggtgcctggcctcgcgccgccgtgtatcgccccgccctgggcggcaaggctggcccggtcggcaccagttgcgtgagcggaaagatggccgcttcccggccctgctgcagggagctcaaaatggaggacgcggcgctcgggagagcgggcgggtgagtcacccacacaaaggaaaagggcctttccgtcctcagccgtcgcttcatgtgactccacggagtaccgggcgccgtccaggcacctcgattagttctcgagcttttggagtacgtcgtctttaggttggggggaggggttttatgcgatggagtttccccacactgagtgggtggagactgaagttaggccagcttggcacttgatgtaattctccttggaatttgccctttttgagtttggatcttggttcattctcaagcctcagacagtggttcaaagtttttttcttccatttcaggtgtcgtgaggatctatttccggtgaattcgccgccaccatgagcgataacggcccccaaaaccaacggaatgcccctcggataacatttggtggccctagtgattccacaggaagtaaccaaaacggagaacggtctggagcccgctctaaacagaggcgaccacagggattgccaaataacacagcgtcatggtttacagccctgactcaacatggaaaggaggacttgaaatttccacgaggacagggtgtaccaataaacacaaacagtagtccagacgatcagatcgggtattatagaagggccacgagacgcatcagaggtggagatggtaaaatgaaagatctcagtccgcgctggtacttttattatttgggaaccggcccagaagcgggcctcccatatggagccaataaggacgggattatatgggtggctacagagggagccctcaatacgccaaaagatcacatcggaacaagaaaccctgctaataatgccgcaatcgtgctgcagttgcctcaggggacgacgcttcctaaaggcttttacgcagaaggatcacgcggcggcagccaagcatcctcaaggtctagttccagaagtcgaaacagctccagaaactccacaccagggtccagtaggggcacaagtccggcgcggatggcgggcaacggcggagacgccgcactcgctctgttgctcctggaccggctcaaccaacttgaatccaagatgagtggtaagggacagcagcaacaaggtcaaaccgtaaccaagaaaagcgctgcagaagcttctaaaaaacctcgacaaaaacggaccgctacgaaggcatataacgttactcaagccttcgggagacgagggccggagcaaacccaggggaattttggagatcaggagctcatccggcaagggacagattacaaacattggcctcaaatcgctcagttcgcgccgtccgcaagtgcttttttcggaatgtctcgcatcggtatggaagtaacaccatccgggacatggctcacttataccggcgccatcaagctggacgacaaagatccaaatttcaaagatcaggtgattctcttgaataaacacatagacgcgtataagacgtttccacccaccgaacccaagaaggacaaaaagaaaaaagctgatgaaacacaagcgttgccccagcgacagaagaagcagcaaaccgtcaccctcctgccagccgctgatctcgatgacttctccaagcaacttcaacagtccatgagctcagccgattctactcaggcgggcagtggagagggcagaggaagtctgctaacatgcggtgacgtcgaggagaatcctggcccaatgagtaaaggagaagctgtgattaaagagttcatgcgcttcaaagttcacatggagggttctatgaacggtcacgagttcgagatcgaaggcgaaggcgagggccgtccgtatgaaggcacccagaccgccaaactgaaagtgactaaaggcggcccgctgcctttttcctgggacatcctgagcccgcaatttatgtacggttctagggcgttcaccaaacacccagcggatatcccggactattataagcagtcttttccggaaggtttcaagtgggaacgcgtaatgaattttgaagatggtggtgccgtgaccgtcactcaggacacctccctggaggatggcaccctgatctataaagttaaactgcgtggtactaattttccacctgatggcccggtgatgcagaaaaagacgatgggttgggaggcgtctaccgaacgcttgtatccggaagatggtgtgctgaaaggcgacattaaaatggccctgcgcctgaaagatggcggccgctatctggctgacttcaaaaccacgtacaaagccaagaaacctgtgcagatgcctggcgcgtacaatgtggaccgcaaactggacatcacctctcataatgaagattatacggtggtagagcaatatgagcgctccgagggtcgtcattctaccggtggcatggatgaactatacaaataagtttaaacccgctgatcagcctcgactgtgccttctagttgccagccatctgttgtttgcccctcccccgtgccttccttgaccctggaaggtgccactcccactgtcctttcctaataaaatgaggaaattgcatcgcattgtctgagtaggtgtcattctattctggggggtggggtggggcaggacagcaagggggaggattgggaagacaatagcaggcatgctggggatgcggtgggctctatgggaccgagcggccgcaggaacccctagtgatggagttggccactccctctctgcgcgctcgctcgctcactgaggccgggcgaccaaaggtcgcccgacgcccgggctttgcccgggcggcctcagtgagcgagcgagcgcgcagctgcctgcaggggcgcctgatgcggtattttctccttacgcatctgtgcggtatttcacaccgcatacgtcaaagcaaccatagtacgcgccctgtagcggcgcattaagcgcggcgggtgtggtggttacgcgcagcgtgaccgctacacttgccagcgccctagcgcccgctcctttcgctttcttcccttcctttctcgccacgttcgccggctttccccgtcaagctctaaatcgggggctccctttagggttccgatttagtgctttacggcacctcgaccccaaaaaacttgatttgggtgatggttcacgtagtgggccatcgccctgatagacggtttttcgccctttgacgttggagtccacgttctttaatagtggactcttgttccaaactggaacaacactcaaccctatctcgggctattcttttgatttataagggattttgccgatttcggcctattggttaaaaaatgagctgatttaacaaaaatttaacgcgaattttaacaaaatattaacgtttacaattttatggtgcactctcagtacaatctgctctgatgccgcatagttaagccagccccgacacccgccaacacccgctgacgcgccctgacgggcttgtctgctcccggcatccgcttacagacaagctgtgaccgtctccgggagctgcatgtgtcagaggttttcaccgtcatcaccgaaacgcgcgagacgaaagggcctcgtgatacgcctatttttataggttaatgtcatgataataatggtttcttagacgtcaggtggcacttttcggggaaatgtgcgcggaacccctatttgtttatttttctaaatacattcaaatatgtatccgctcatgagacaataaccctgataaatgcttcaataatattgaaaaaggaagagtatgagtattcaacatttccgtgtcgcccttattcccttttttgcggcattttgccttcctgtttttgctcacccagaaacgctggtgaaagtaaaagatgctgaagatcagttgggtgcacgagtgggttacatcgaactggatctcaacagcggtaagatccttgagagttttcgccccgaagaacgttttccaatgatgagcacttttaaagttctgctatgtggcgcggtattatcccgtattgacgccgggcaagagcaactcggtcgccgcatacactattctcagaatgacttggttgagtactcaccagtcacagaaaagcatcttacggatggcatgacagtaagagaattatgcagtgctgccataaccatgagtgataacactgcggccaacttacttctgacaacgatcggaggaccgaaggagctaaccgcttttttgcacaacatgggggatcatgtaactcgccttgatcgttgggaaccggagctgaatgaagccataccaaacgacgagcgtgacaccacgatgcctgtagcaatggcaacaacgttgcgcaaactattaactggcgaactacttactctagcttcccggcaacaattaatagactggatggaggcggataaagttgcaggaccacttctgcgctcggcccttccggctggctggtttattgctgataaatctggagccggtgagcgtgggtctcgcggtatcattgcagcactggggccagatggtaagccctcccgtatcgtagttatctacacgacggggagtcaggcaactatggatgaacgaaatagacagatcgctgagataggtgcctcactgattaagcattggtaactgtcagaccaagtttactcatatatactttagattgatttaaaacttcatttttaatttaaaaggatctaggtgaagatcctttttgataatctcatgaccaaaatcccttaacgtgagttttcgttccactgagcgtcagaccccgtagaaaagatcaaaggatcttcttgagatcctttttttctgcgcgtaatctgctgcttgcaaacaaaaaaaccaccgctaccagcggtggtttgtttgccggatcaagagctaccaactctttttccgaaggtaactggcttcagcagagcgcagataccaaatactgtccttctagtgtagccgtagttaggccaccacttcaagaactctgtagcaccgcctacatacctcgctctgctaatcctgttaccagtggctgctgccagtggcgataagtcgtgtcttaccgggttggactcaagacgatagttaccggataaggcgcagcggtcgggctgaacggggggttcgtgcacacagcccagcttggagcgaacgacctacaccgaactgagatacctacagcgtgagctatgagaaagcgccacgcttcccgaagggagaaaggcggacaggtatccggtaagcggcagggtcggaacaggagagcgcacgagggagcttccagggggaaacgcctggtatctttatagtcctgtcgggtttcgccacctctgacttgagcgtcgatttttgtgatgctcgtcaggggggcggagcctatggaaaaacgccagcaacgcggcctttttacggttcctggccttttgctggccttttgctcacatgt

SEQ ID NO: 121 - DNA, 7787 bp, synthetic construct
  misc_feature 1..7787: note = pMD144_pAAV-EFS-S protein-TA-M protein
  source 1..7787: mol_type = other DNA
cctgcaggcagctgcgcgctcgctcgctcactgaggccgcccgggcaaagcccgggcgtcgggcgacctttggtcgcccggcctcagtgagcgagcgagcgcgcagagagggagtggccaactccatcactaggggttcctgcggccgcataggtcttgaaaggagtgggaattggctccggtgcccgtcagtgggcagagcgcacatcgcccacagtccccgagaagttggggggaggggtcggcaattgatccggtgcctagagaaggtggcgcggggtaaactgggaaagtgatgtcgtgtactggctccgcctttttcccgagggtgggggagaaccgtatataagtgcagtagtcgccgtgaacgttctttttcgcaacgggtttgccgccagaacacaggaccggttctagacgtacggccaccatgtttgtgttcctggtgctgctgccactggtgtccagccagtgtgtgaacctgaccaccaggacccaacttcctcctgcctacaccaactccttcaccaggggagtctactaccctgacaaggtgttcaggtcctctgtgctgcacagcacccaggacctgttcctgccattcttcagcaatgtgacctggttccatgccatccatgtgtctggcaccaatggcaccaagaggtttgacaaccctgtgctgccattcaatgatggagtctactttgccagcacagagaagagcaacatcatcaggggctggatttttggcaccaccctggacagcaagacccagtccctgctgattgtgaacaatgccaccaatgtggtgattaaggtgtgtgagttccagttctgtaatgacccattcctgggagtctactaccacaagaacaacaagtcctggatggagtctgagttcagggtctactcctctgccaacaactgtacctttgaatatgtgagccaaccattcctgatggacttggagggcaagcagggcaacttcaagaacctgagggagtttgtgttcaagaacattgatggctacttcaagatttacagcaaacacacaccaatcaacctggtgagggacctgccacagggcttctctgccttggaaccactggtggacctgccaattggcatcaacatcaccaggttccagaccctgctggctctgcacaggtcctacctgacacctggagactcctcctctggctggacagcaggagcagcagcctactatgtgggctacctccaaccaaggaccttcctgctgaaatacaatgagaatggcaccatcacagatgctgtggactgtgccctggacccactgtctgagaccaagtgtaccctgaaatccttcacagtggagaagggcatctaccagaccagcaacttcagggtccaaccaacagagagcattgtgaggtttccaaacatcaccaacctgtgtccatttggagaggtgttcaatgccaccaggtttgcctctgtctatgcctggaacaggaagaggattagcaactgtgtggctgactactctgtgctctacaactctgcctccttcagcaccttcaagtgttatggagtgagcccaaccaaactgaatgacctgtgtttcaccaatgtctatgctgactcctttgtgattaggggagatgaggtgagacagattgcccctggacaaacaggcaagattgctgactacaactacaaactgcctgatgacttcacaggctgtgtgattgcctggaacagcaacaacctggacagcaaggtgggaggcaactacaactacctctacagactgttcaggaagagcaacctgaaaccatttgagagggacatcagcacagagatttaccaggctggcagcacaccatgtaatggagtggagggcttcaactgttactttccactccaatcctatggcttccaaccaaccaatggagtgggctaccaaccatacagggtggtggtgctgtcctttgaactgctccatgcccctgccacagtgtgtggaccaaagaagagcaccaacctggtgaagaacaagtgtgtgaacttcaacttcaatggactgacaggcacaggagtgctgacagagagcaacaagaagttcctgccattccaacagtttggcagggacattgctgacaccacagatgctgtgagggacccacagaccttggagattctggacatcacaccatgttcctttggaggagtgtctgtgattacacctggcaccaacaccagcaaccaggtggctgtgctctaccaggatgtgaactgtactgaggtgcctgtggctatccatgctgaccaacttacaccaacctggagggtctacagcacaggcagcaatgtgttccagaccagggctggctgtctgattggagcagagcatgtgaacaactcctatgagtgtgacatcccaattggagcaggcatctgtgcctcctaccagacccagaccaacagcccaaggagggcaaggtctgtggcaagccagagcatcattgcctacacaatgagtctgggagcagagaactctgtggcttacagcaacaacagcattgccatcccaaccaacttcaccatctctgtgaccacagagattctgcctgtgagtatgaccaagacctctgtggactgtacaatgtatatctgtggagacagcacagagtgtagcaacctgctgctccaatatggctccttctgtacccaacttaacagggctctgacaggcattgctgtggaacaggacaagaacacccaggaggtgtttgcccaggtgaagcagatttacaagacacctccaatcaaggactttggaggcttcaacttcagccagattctgcctgacccaagcaagccaagcaagaggtccttcattgaggacctgctgttcaacaaggtgaccctggctgatgctggcttcatcaagcaatatggagactgtctgggagacattgctgccagggacctgatttgtgcccagaagttcaatggactgacagtgctgcctccactgctgacagatgagatgattgcccaatacacctctgccctgctggctggcaccatcacctctggctggacctttggagcaggagcagccctccaaatcccatttgctatgcagatggcttacaggttcaatggcattggagtgacccagaatgtgctctatgagaaccagaaactgattgccaaccagttcaactctgccattggcaagattcaggactccctgtccagcacagcctctgccctgggcaaactccaagatgtggtgaaccagaatgcccaggctctgaacaccctggtgaagcaactttccagcaactttggagccatctcctctgtgctgaatgacatcctgagcagactggacaaggtggaggctgaggtccagattgacagactgattacaggcagactccaatccctccaaacctatgtgacccaacaacttatcagggctgctgagattagggcatctgccaacctggctgccaccaagatgagtgagtgtgtgctgggacaaagcaagagggtggacttctgtggcaagggctaccacctgatgagttttccacagtctgcccctcatggagtggtgttcctgcatgtgacctatgtgcctgcccaggagaagaacttcaccacagcccctgccatctgccatgatggcaaggctcactttccaagggagggagtgtttgtgagcaatggcacccactggtttgtgacccagaggaacttctatgaaccacagattatcaccacagacaacacctttgtgtctggcaactgtgatgtggtgattggcattgtgaacaacacagtctatgacccactccaacctgaactggactccttcaaggaggaactggacaaatacttcaagaaccacaccagccctgatgtggacctgggagacatctctggcatcaatgcctctgtggtgaacatccagaaggagattgacagactgaatgaggtggctaagaacctgaatgagtccctgattgacctccaagaactgggcaaatatgaacaatacatcaagtggccatggtacatctggctgggcttcattgctggactgattgccattgtgatggtgaccataatgctgtgttgtatgacctcctgttgttcctgtctgaaaggctgttgttcctgtggctcctgttgtaagtttgatgaggatgactctgaacctgtgctgaaaggagtgaaactgcactacaccggcagtggagagggcagaggaagtctgctaacatgcggtgacgtcgaggagaatcctggcccaatggccgactcaaatgggaccattactgtagaggagctgaaaaaactgttggagcaatggaaccttgtgattggatttctcttcttgacatggatttgtctcctgcaattcgcatacgcgaatcgcaaccgattcctctatattataaaacttatattcctttggctcctgtggcctgtgacccttgcctgcttcgtactcgcggcggtgtatcgaataaactggataactggcggcatagcaatagctatggcatgcctggtaggtttgatgtggctctcctattttatagcgtcattcagactttttgcacgcacgcgaagcatgtggtcatttaaccctgaaacaaatatcttgcttaatgtccccctgcatggcacaattttgacccgaccgctccttgaatcagaattggtgattggagccgtgatcctgaggggccacttgaggatcgcaggacatcatcttggtcgctgtgatattaaggatttgccaaaagaaataactgtagctaccagtcgaactttgagctattacaagcttggagcgtcccaaagggtcgctggcgatagtggatttgcagcctattcacgctacaggatagggaactataaactgaatacagaccactcatcatcttctgataacattgctttgctcgtccagtgagaattcaataaaagatctttattttcattagatctgtgtgttggttttttgtgtgaccgagcggccgcaggaacccctagtgatggagttggccactccctctctgcgcgctcgctcgctcactgaggccgggcgaccaaaggtcgcccgacgcccgggctttgcccgggcggcctcagtgagcgagcgagcgcgcagctgcctgcaggggcgcctgatgcggtattttctccttacgcatctgtgcggtatttcacaccgcatacgtcaaagcaaccatagtacgcgccctgtagcggcgcattaagcgcggcgggtgtggtggttacgcgcagcgtgaccgctacacttgccagcgccctagcgcccgctcctttcgctttcttcccttcctttctcgccacgttcgccggctttccccgtcaagctctaaatcgggggctccctttagggttccgatttagtgctttacggcacctcgaccccaaaaaacttgatttgggtgatggttcacgtagtgggccatcgccctgatagacggtttttcgccctttgacgttggagtccacgttctttaatagtggactcttgttccaaactggaacaacactcaaccctatctcgggctattcttttgatttataagggattttgccgatttcggcctattggttaaaaaatgagctgatttaacaaaaatttaacgcgaattttaacaaaatattaacgtttacaattttatggtgcactctcagtacaatctgctctgatgccgcatagttaagccagccccgacacccgccaacacccgctgacgcgccctgacgggcttgtctgctcccggcatccgcttacagacaagctgtgaccgtctccgggagctgcatgtgtcagaggttttcaccgtcatcaccgaaacgcgcgagacgaaagggcctcgtgatacgcctatttttataggttaatgtcatgataataatggtttcttagacgtcaggtggcacttttcggggaaatgtgcgcggaacccctatttgtttatttttctaaatacattcaaatatgtatccgctcatgagacaataaccctgataaatgcttcaataatattgaaaaaggaagagtatgagtattcaacatttccgtgtcgcccttattcccttttttgcggcattttgccttcctgtttttgctcacccagaaacgctggtgaaagtaaaagatgctgaagatcagttgggtgcacgagtgggttacatcgaactggatctcaacagcggtaagatccttgagagttttcgccccgaagaacgttttccaatgatgagcacttttaaagttctgctatgtggcgcggtattatcccgtattgacgccgggcaagagcaactcggtcgccgcatacactattctcagaatgacttggttgagtactcaccagtcacagaaaagcatcttacggatggcatgacagtaagagaattatgcagtgctgccataaccatgagtgataacactgcggccaacttacttctgacaacgatcggaggaccgaaggagctaaccgcttttttgcacaacatgggggatcatgtaactcgccttgatcgttgggaaccggagctgaatgaagccataccaaacgacgagcgtgacaccacgatgcctgtagcaatggcaacaacgttgcgcaaactattaactggcgaactacttactctagcttcccggcaacaattaatagactggatggaggcggataaagttgcaggaccacttctgcgctcggcccttccggctggctggtttattgctgataaatctggagccggtgagcgtgggtctcgcggtatcattgcagcactggggccagatggtaagccctcccgtatcgtagttatctacacgacggggagtcaggcaactatggatgaacgaaatagacagatcgctgagataggtgcctcactgattaagcattggtaactgtcagaccaagtttactcatatatactttagattgatttaaaacttcatttttaatttaaaaggatctaggtgaagatcctttttgataatctcatgaccaaaatcccttaacgtgagttttcgttccactgagcgtcagaccccgtagaaaagatcaaaggatcttcttgagatcctttttttctgcgcgtaatctgctgcttgcaaacaaaaaaaccaccgctaccagcggtggtttgtttgccggatcaagagctaccaactctttttccgaaggtaactggcttcagcagagcgcagataccaaatactgtccttctagtgtagccgtagttaggccaccacttcaagaactctgtagcaccgcctacatacctcgctctgctaatcctgttaccagtggctgctgccagtggcgataagtcgtgtcttaccgggttggactcaagacgatagttaccggataaggcgcagcggtcgggctgaacggggggttcgtgcacacagcccagcttggagcgaacgacctacaccgaactgagatacctacagcgtgagctatgagaaagcgccacgcttcccgaagggagaaaggcggacaggtatccggtaagcggcagggtcggaacaggagagcgcacgagggagcttccagggggaaacgcctggtatctttatagtcctgtcgggtttcgccacctctgacttgagcgtcgatttttgtgatgctcgtcaggggggcggagcctatggaaaaacgccagcaacgcggcctttttacggttcctggccttttgctggccttttgctcacatgt

SEQ ID NO: 122 - DNA, 8574 bp, synthetic construct
  misc_feature 1..8574: note = pMD145-pMSCV-EFS-N protein-TA-mScarlet
  source 1..8574: mol_type = other DNA
gaccccacctgtaggtttggcaagctagcttaagtaacgccattttgcaaggcatggaaaatacataactgagaatagagaagttcagatcaaggttaggaacagagagacagcagaatatgggccaaacaggatatctgtggtaagcagttcctgccccggctcagggccaagaacagatggtccccagatgcggtcccgccctcagcagtttctagagaaccatcagatgtttccagggtgccccaaggacctgaaatgaccctgtgccttatttgaactaaccaatcagttcgcttctcgcttctgttcgcgcgcttctgctccccgagctcaataaaagagcccacaacccctcactcggcgcgccagtcctccgatagactgcgtcgcccgggtacccgtattcccaataaagcctcttgctgtttgcatccgaatcgtggactcgctgatccttgggagggtctcctcagattgattgactgcccacctcgggggtctttcatttggaggttccaccgagatttggagacccctgcccagggaccaccgacccccccgccgggaggtaagctggccagcggtcgtttcgtgtctgtctctgtctttgtgcgtgtttgtgccggcatctaatgtttgcgcctgcgtctgtactagttagctaactagctctgtatctggcggacccgtggtggaactgacgagttctgaacacccggccgcaaccctgggagacgtcccagggactttgggggccgtttttgtggcccgacctgaggaagggagtcgatgtggaatccgaccccgtcaggatatgtggttctggtaggagacgagaacctaaaacagttcccgcctccgtctgaatttttgctttcggtttggaaccgaagccgcgcgtcttgtctgctgcagcgctgcagcatcgttctgtgttgtctctgtctgactgtgtttctgtatttgtctgaaaattagggccagactgttaccactcccttaagtttgaccttaggtcactggaaagatgtcgagcggatcgctcacaaccagtcggtagatgtcaagaagagacgttgggttaccttctgctctgcagaatggccaacctttaacgtcggatggccgcgagacggcacctttaaccgagacctcatcacccaggttaagatcaaggtcttttcacctggcccgcatggacacccagaccaggtcccctacatcgtgacctgggaagccttggcttttgacccccctccctgggtcaagccctttgtacaccctaagcctccgcctcctcttcctccatccgccccgtctctcccccttgaacctcctcgttcgaccccgcctcgatcctccctttatccagccctcactccttctctaggcgccggaattagatctctcgagatcgatgccttgagacaaatggcagtattcatccacaattttaaaagaaaaggggggattggggggtacagtgcaggggaaagaatagtagacataatagcaacagacatacaaactaaagaattacaaaaacaaattacaaaaattcaaaattttcgggtttattacagggacagcagagatccactttggcgccggctcgagggggccgctccggtgcccgtcagtgggcagagcgcacatcgcccacagtccccgagaagttggggggaggggtcggcaattgaaccggtgcctagagaaggtggcgcggggtaaactgggaaagtgatgtcgtgtactggctccgcctttttcccgagggtgggggagaaccgtatataagtgcagtagtcgccgtgaacgttctttttcgcaacgggtttgccgccagaacacaggtaagtgccgtgtgtggttcccgcgggcctggcctctttacgggttatggcccttgcgtgccttgaattacttccacgcccctggctgcagtacgtgattcttgatcccgagcttcgggttggaagtgggtgggagagttcgaggccttgcgcttaaggagccccttcgcctcgtgcttgagttgaggcctggcttgggcgctggggccgccgcgtgcgaatctggtggcaccttcgcgcctgtctcgctgctttcgataagtctctagccatttaaaatttttgatgacctgctgcgacgctttttttctggcaagatagtcttgtaaatgcgggccaagatctgcacactggtatttcggtttttggggccgcgggcggcgacggggcccgtgcgtcccagcgcacatgttcggcgaggcggggcctgcgagcgcggccaccgagaatcggacgggggtagtctcaagctggccggcctgctctggtgcctggcctcgcgccgccgtgtatcgccccgccctgggcggcaaggctggcccggtcggcaccagttgcgtgagcggaaagatggccgcttcccggccctgctgcagggagctcaaaatggaggacgcggcgctcgggagagcgggcgggtgagtcacccacacaaaggaaaagggcctttccgtcctcagccgtcgcttcatgtgactccacggagtaccgggcgccgtccaggcacctcgattagttctcgagcttttggagtacgtcgtctttaggttggggggaggggttttatgcgatggagtttccccacactgagtgggtggagactgaagttaggccagcttggcacttgatgtaattctccttggaatttgccctttttgagtttggatcttggttcattctcaagcctcagacagtggttcaaagtttttttcttccatttcaggtgtcgtgaggatctatttccggtgaattcgccgccaccatgagcgataacggcccccaaaaccaacggaatgcccctcggataacatttggtggccctagtgattccacaggaagtaaccaaaacggagaacggtctggagcccgctctaaacagaggcgaccacagggattgccaaataacacagcgtcatggtttacagccctgactcaacatggaaaggaggacttgaaatttccacgaggacagggtgtaccaataaacacaaacagtagtccagacgatcagatcgggtattatagaagggccacgagacgcatcagaggtggagatggtaaaatgaaagatctcagtccgcgctggtacttttattatttgggaaccggcccagaagcgggcctcccatatggagccaataaggacgggattatatgggtggctacagagggagccctcaatacgccaaaagatcacatcggaacaagaaaccctgctaataatgccgcaatcgtgctgcagttgcctcaggggacgacgcttcctaaaggcttttacgcagaaggatcacgcggcggcagccaagcatcctcaaggtctagttccagaagtcgaaacagctccagaaactccacaccagggtccagtaggggcacaagtccggcgcggatggcgggcaacggcggagacgccgcactcgctctgttgctcctggaccggctcaaccaacttgaatccaagatgagtggtaagggacagcagcaacaaggtcaaaccgtaaccaagaaaagcgctgcagaagcttctaaaaaacctcgacaaaaacggaccgctacgaaggcatataacgttactcaagccttcgggagacgagggccggagcaaacccaggggaattttggagatcaggagctcatccggcaagggacagattacaaacattggcctcaaatcgctcagttcgcgccgtccgcaagtgcttttttcggaatgtctcgcatcggtatggaagtaacaccatccgggacatggctcacttataccggcgccatcaagctggacgacaaagatccaaatttcaaagatcaggtgattctcttgaataaacacatagacgcgtataagacgtttccacccaccgaacccaagaaggacaaaaagaaaaaagctgatgaaacacaagcgttgccccagcgacagaagaagcagcaaaccgtcaccctcctgccagccgctgatctcgatgacttctccaagcaacttcaacagtccatgagctcagccgattctactcaggcgggatccggcgcaacaaacttctctctgctgaaacaagccggagatgtcgaagagaatcctggaccgatgagtaaaggagaagctgtgattaaagagttcatgcgcttcaaagttcacatggagggttctatgaacggtcacgagttcgagatcgaaggcgaaggcgagggccgtccgtatgaaggcacccagaccgccaaactgaaagtgactaaaggcggcccgctgcctttttcctgggacatcctgagcccgcaatttatgtacggttctagggcgttcaccaaacacccagcggatatcccggactattataagcagtcttttccggaaggtttcaagtgggaacgcgtaatgaattttgaagatggtggtgccgtgaccgtcactcaggacacctccctggaggatggcaccctgatctataaagttaaactgcgtggtactaattttccacctgatggcccggtgatgcagaaaaagacgatgggttgggaggcgtctaccgaacgcttgtatccggaagatggtgtgctgaaaggcgacattaaaatggccctgcgcctgaaagatggcggccgctatctggctgacttcaaaaccacgtacaaagccaagaaacctgtgcagatgcctggcgcgtacaatgtggaccgcaaactggacatcacctctcataatgaagattatacggtggtagagcaatatgagcgctccgagggtcgtcattctaccggtggcatggatgaactatacaaataagaattcagcgctaataaaagatctttattttcattagatctgtgtgttggttttttgtgtcgataaaataaaagattttatttagtctccagaaaaaggggggaatgaaagaccccacctgtaggtttggcaagctagcttaagtaacgccattttgcaaggcatggaaaatacataactgagaatagagaagttcagatcaaggttaggaacagagagacagcagaatatgggccaaacaggatatctgtggtaagcagttcctgccccggctcagggccaagaacagatggtccccagatgcggtcccgccctcagcagtttctagagaaccatcagatgtttccagggtgccccaaggacctgaaatgaccctgtgccttatttgaactaaccaatcagttcgcttctcgcttctgttcgcgcgcttctgctccccgagctcaataaaagagcccacaacccctcactcggcgcgccagtcctccgatagactgcgtcgcccgggtacccgtgtatccaataaaccctcttgcagttgcatccgacttgtggtctcgctgttccttgggagggtctcctctgagtgattgactacccgtcagcgggggtctttcatgggtaacagtttcttgaagttggagaacaacattctgagggtaggagtcgaatattaagtaatcctgactcaattagccactgttttgaatccacatactccaatactcctgaaatagttcattatggacagcgcagaaagagctggggagaattgtgaaattgttatccgctcacaattccacacaacatacgagccggaagcataaagtgtaaagcctggggtgcctaatgagtgagctaactcacattaattgcgttgcgctcactgcccgctttccagtcgggaaacctgtcgtgccagctgcattaatgaatcggccaacgcgcggggagaggcggtttgcgtattgggcgctcttccgcttcctcgctcactgactcgctgcgctcggtcgttcggctgcggcgagcggtatcagctcactcaaaggcggtaatacggttatccacagaatcaggggataacgcaggaaagaacatgtgagcaaaaggccagcaaaaggccaggaaccgtaaaaaggccgcgttgctggcgtttttccataggctccgcccccctgacgagcatcacaaaaatcgacgctcaagtcagaggtggcgaaacccgacaggactataaagataccaggcgtttccccctggaagctccctcgtgcgctctcctgttccgaccctgccgcttaccggatacctgtccgcctttctcccttcgggaagcgtggcgctttctcatagctcacgctgtaggtatctcagttcggtgtaggtcgttcgctccaagctgggctgtgtgcacgaaccccccgttcagcccgaccgctgcgccttatccggtaactatcgtcttgagtccaacccggtaagacacgacttatcgccactggcagcagccactggtaacaggattagcagagcgaggtatgtaggcggtgctacagagttcttgaagtggtggcctaactacggctacactagaagaacagtatttggtatctgcgctctgctgaagccagttaccttcggaaaaagagttggtagctcttgatccggcaaacaaaccaccgctggtagcggtggtttttttgtttgcaagcagcagattacgcgcagaaaaaaaggatctcaagaagatcctttgatcttttctacggggtctgacgctcagtggaacgaaaactcacgttaagggattttggtcatgagattatcaaaaaggatcttcacctagatccttttaaattaaaaatgaagttttaaatcaatctaaagtatatatgagtaaacttggtctgacagttaccaatgcttaatcagtgaggcacctatctcagcgatctgtctatttcgttcatccatagttgcctgactccccgtcgtgtagataactacgatacgggagggcttaccatctggccccagtgctgcaatgataccgcgagacccacgctcaccggctccagatttatcagcaataaaccagccagccggaagggccgagcgcagaagtggtcctgcaactttatccgcctccatccagtctattaattgttgccgggaagctagagtaagtagttcgccagttaatagtttgcgcaacgttgttgccattgctacaggcatcgtggtgtcacgctcgtcgtttggtatggcttcattcagctccggttcccaacgatcaaggcgagttacatgatcccccatgttgtgcaaaaaagcggttagctccttcggtcctccgatcgttgtcagaagtaagttggccgcagtgttatcactcatggttatggcagcactgcataattctcttactgtcatgccatccgtaagatgcttttctgtgactggtgagtactcaaccaagtcattctgagaatagtgtatgcggcgaccgagttgctcttgcccggcgtcaatacgggataataccgcgccacatagcagaactttaaaagtgctcatcattggaaaacgttcttcggggcgaaaactctcaaggatcttaccgctgttgagatccagttcgatgtaacccactcgtgcacccaactgatcttcagcatcttttactttcaccagcgtttctgggtgagcaaaaacaggaaggcaaaatgccgcaaaaaagggaataagggcgacacggaaatgttgaatactcatactcttcctttttcaatattattgaagcatttatcagggttattgtctcatgagcggatacatatttgaatgtatttagaaaaataaacaaataggggttccgcgcacatttccccgaaaagtgccacctgacgtctaagaaaccattattatcatgacattaacctataaaaataggcgtatcacgaggccctttcgtctcgcgcgtttcggtgatgacggtgaaaacctctgacacatgcagctcccggagacggtcacagcttgtctgtaagcggatgccgggagcagacaagcccgtcagggcgcgtcagcgggtgttggcgggtgtcggggctggcttaactatgcggcatcagagcagattgtactgagagtgcaccatatgcggtgtgaaataccgcacagatgcgtaaggagaaaataccgcatcaggcgccattcgccattcaggctgcgcaactgttgggaagggcgatcggtgcgggcctcttcgctattacgccagctggcgaaagggggatgtgctgcaaggcgattaagttgggtaacgccagggttttcccagtcacgacgttgtaaaacgacggcgcaaggaatggtgcatgcaaggagatggcgcccaacagtcccccggccacggggcctgccaccatacccacgccgaaacaagcgctcatgagcccgaagtggcgagcccgatcttccccatcggtgatgtcggcgatataggcgccagcaaccgcacctgtggcgccggtgatgccggccacgatgcgtccggcgtagaggcgattagtccaatttgttaaagacaggatatcagtggtccaggctctagttttgactcaacaatatcaccagctgaagcctatagagtacgagccatagataaaataaaagattttatttagtctccagaaaaaggggggaatgaaa

SEQ ID NO: 123 - DNA, 7042 bp, synthetic construct
  source 1..7042: mol_type = other DNA
gacggatcgggagatctcccgatcccctatggtgcactctcagtacaatctgctctgatgccgcatagttaagccagtatctgctccctgcttgtgtgttggaggtcgctgagtagtgcgcgagcaaaatttaagctacaacaaggcaaggcttgaccgacaattgcatgaagaatctgcttagggttaggcgttttgcgctgcttcgcgatgtacgggccagatatacgcgttgacattgattattgactagttattaatagtaatcaattacggggtcattagttcatagcccatatatggagttccgcgttacataacttacggtaaatggcccgcctggctgaccgcccaacgacccccgcccattgacgtcaataatgacgtatgttcccatagtaacgccaatagggactttccattgacgtcaatgggtggagtatttacggtaaactgcccacttggcagtacatcaagtgtatcatatgccaagtacgccccctattgacgtcaatgacggtaaatggcccgcctggcattatgcccagtacatgaccttatgggactttcctacttggcagtacatctacgtattagtcatcgctattaccatggtgatgcggttttggcagtacatcaatgggcgtggatagcggtttgactcacggggatttccaagtctccaccccattgacgtcaatgggagtttgttttggcaccaaaatcaacgggactttccaaaatgtcgtaacaactccgccccattgacgcaaatgggcggtaggcgtgtacggtgggaggtctatataagcagagctctctggctaactagagaacccactgcttactggcttatcgaaattaatacgactcactatagggagacccaagctggctagccaccgagaataaactagtattcttctggtccccacagactcagagagaacccgccaccatggacgccatgaagagaggcctgtgctgcgtgctgctgctgtgcggcgccgtgttcgtgagccctagcagggtccaaccaacagagagcattgtgaggtttccaaacatcaccaacctgtgtccatttgacgaggtgttcaacgccaccaggtttgcctctgtctatgcctggaacaggaagaggattagcaactgtgtggctgactactctgtgctctacaacttcgcccccttcttcgccttcaagtgttatggagtgagcccaaccaaactgaatgacctgtgtttcaccaatgtctatgctgactcctttgtgattaggggaaacgaggtgagccagattgcccctggacaaacaggcaacattgctgactacaactacaaactgcctgatgacttcacaggctgtgtgattgcctggaacagcaacaagctggacagcaaggtgggcggcaactacaactacctctacagactgttcaggaagagcaacctgaaaccatttgagagggacatcagcacagagatttaccaggctggcaacaagccatgtaatggagtggccggcttcaactgttactttccactccggtcctatggcttccggccaacctacggagtgggccaccaaccatacagggtggtggtgctgtcctttgaactgctccatgcccctgccacagtgtgtggaccaaagaagagcaccaacctggtgaagaacaagtgtgtgaacttcggcagcggcggctacatccccgaggcccctagagacggccaagcctacgtgagaaaggacggcgaatgggtactcctgagcaccttcctgggtggcggaggcagcggcgggggaggcagcctgtccaaggacatcatcaagctgctgaacgagcaagtgaacaaggagatgaacagcagcaacctgtacatgagcatgagcagctggtgctacacccacagcctggacggcgccggcctgttcctgttcgaccacgccgccgaggagtacgagcacgccaagaagctgatcatcttcctgaacgagaacaacgtgcccgtgcagctgacaagcatcagcgcccccgagcacaagttcgagggcctgacacagatctttcagaaggcctacgagcacgagcagcacatcagcgagagcatcaacaacatcgtggaccacgccatcaagagcaaggaccacgccaccttcaacttcctgcagtggtacgtggccgagcagcacgaggaagaggtgctgttcaaggacatcctggacaagatcgagctgatcggcaacgagaaccacggcctgtacctggccgatcagtacgtgaagggcatcgccaagagcagaaagagctgataatagctcgagctggtactgcatgcacgcaatgctagctgcccctttcccgtcctgggtaccccgagtctcccccgacctcgggtcccaggtatgctcccacctccacctgccccactcaccacctctgctagttccagacacctcccaagcacgcagcaatgcagctcaaaacgcttagcctagccacacccccacgggaaacagcagtgattaacctttagcaataaacgaaagtttaactaagctatactaaccccagggttggtcaatttcgtgccagccacaccctggagctagcaaaccgctgatcagcctcgactgtgccttctagttgccagccatctgttgtttgcccctcccccgtgccttccttgaccctggaaggtgccactcccactgtcctttcctaataaaatgaggaaattgcatcgcattgtctgagtaggtgtcattctattctggggggtggggtggggcaggacagcaagggggaggattgggaagacaatagcaggcatgctggggatgcggtgggctctatggcttctgaggcggaaagaaccagctggggctctagggggtatccccacgcgccctgtagcggcgcattaagcgcggcgggtgtggtggttacgcgcagcgtgaccgctacacttgccagcgccctagcgcccgctcctttcgctttcttcccttcctttctcgccacgttcgccggctttccccgtcaagctctaaatcgggggctccctttagggttccgatttagtgctttacggcacctcgaccccaaaaaacttgattagggtgatggttcacgtagtgggccatcgccctgatagacggtttttcgccctttgacgttggagtccacgttctttaatagtggactcttgttccaaactggaacaacactcaaccctatctcggtctattcttttgatttataagggattttgccgatttcggcctattggttaaaaaatgagctgatttaacaaaaatttaacgcgaattaattctgtggaatgtgtgtcagttagggtgtggaaagtccccaggctccccagcaggcagaagtatgcaaagcatgcatctcaattagtcagcaaccaggtgtggaaagtccccaggctccccagcaggcagaagtatgcaaagcatgcatctcaattagtcagcaaccatagtcccgcccctaactccgcccatcccgcccctaactccgcccagttccgcccattctccgccccatggctgactaattttttttatttatgcagaggccgaggccgcctctgcctctgagctattccagaagtagtgaggaggcttttttggaggcctaggcttttgcaaaaagctcccgggagcttgtatatccattttcggatctgatcaagagacaggatgaggatcgtttcgcatgattgaacaagatggattgcacgcaggttctccggccgcttgggtggagaggctattcggctatgactgggcacaacagacaatcggctgctctgatgccgccgtgttccggctgtcagcgcaggggcgcccggttctttttgtcaagaccgacctgtccggtgccctgaatgaactgcaggacgaggcagcgcggctatcgtggctggccacgacgggcgttccttgcgcagctgtgctcgacgttgtcactgaagcgggaagggactggctgctattgggcgaagtgccggggcaggatctcctgtcatctcaccttgctcctgccgagaaagtatccatcatggctgatgcaatgcggcggctgcatacgcttgatccggctacctgcccattcgaccaccaagcgaaacatcgcatcgagcgagcacgtactcggatggaagccggtcttgtcgatcaggatgatctggacgaagagcatcaggggctcgcgccagccgaactgttcgccaggctcaaggcgcgcatgcccgacggcgaggatctcgtcgtgacccatggcgatgcctgcttgccgaatatcatggtggaaaatggccgcttttctggattcatcgactgtggccggctgggtgtggcggaccgctatcaggacatagcgttggctacccgtgatattgctgaagagcttggcggcgaatgggctgaccgcttcctcgtgctttacggtatcgccgctcccgattcgcagcgcatcgccttctatcgccttcttgacgagttcttctgagcgggactctggggttcgaaatgaccgaccaagcgacgcccaacctgccatcacgagatttcgattccaccgccgccttctatgaaaggttgggcttcggaatcgttttccgggacgccggctggatgatcctccagcgcggggatctcatgctggagttcttcgcccaccccaacttgtttattgcagcttataatggttacaaataaagcaatagcatcacaaatttcacaaataaagcatttttttcactgcattctagttgtggtttgtccaaactcatcaatgtatcttatcatgtctgtataccgtcgacctctagctagagcttggcgtaatcatggtcatagctgtttcctgtgtgaaattgttatccgctcacaattccacacaacatacgagccggaagcataaagtgtaaagcctggggtgcctaatgagtgagctaactcacattaattgcgttgcgctcactgcccgctttccagtcgggaaacctgtcgtgccagctgcattaatgaatcggccaacgcgcggggagaggcggtttgcgtattgggcgctcttccgcttcctcgctcactgactcgctgcgctcggtcgttcggctgcggcgagcggtatcagctcactcaaaggcggtaatacggttatccacagaatcaggggataacgcaggaaagaacatgtgagcaaaaggccagcaaaaggccaggaaccgtaaaaaggccgcgttgctggcgtttttccataggctccgcccccctgacgagcatcacaaaaatcgacgctcaagtcagaggtggcgaaacccgacaggactataaagataccaggcgtttccccctggaagctccctcgtgcgctctcctgttccgaccctgccgcttaccggatacctgtccgcctttctcccttcgggaagcgtggcgctttctcatagctcacgctgtaggtatctcagttcggtgtaggtcgttcgctccaagctgggctgtgtgcacgaaccccccgttcagcccgaccgctgcgccttatccggtaactatcgtcttgagtccaacccggtaagacacgacttatcgccactggcagcagccactggtaacaggattagcagagcgaggtatgtaggcggtgctacagagttcttgaagtggtggcctaactacggctacactagaagaacagtatttggtatctgcgctctgctgaagccagttaccttcggaaaaagagttggtagctcttgatccggcaaacaaaccaccgctggtagcggtggtttttttgtttgcaagcagcagattacgcgcagaaaaaaaggatctcaagaagatcctttgatcttttctacggggtctgacgctcagtggaacgaaaactcacgttaagggattttggtcatgagattatcaaaaaggatcttcacctagatccttttaaattaaaaatgaagttttaaatcaatctaaagtatatatgagtaaacttggtctgacagttaccaatgcttaatcagtgaggcacctatctcagcgatctgtctatttcgttcatccatagttgcctgactccccgtcgtgtagataactacgatacgggagggcttaccatctggccccagtgctgcaatgataccgcgagacccacgctcaccggctccagatttatcagcaataaaccagccagccggaagggccgagcgcagaagtggtcctgcaactttatccgcctccatccagtctattaattgttgccgggaagctagagtaagtagttcgccagttaatagtttgcgcaacgttgttgccattgctacaggcatcgtggtgtcacgctcgtcgtttggtatggcttcattcagctccggttcccaacgatcaaggcgagttacatgatcccccatgttgtgcaaaaaagcggttagctccttcggtcctccgatcgttgtcagaagtaagttggccgcagtgttatcactcatggttatggcagcactgcataattctcttactgtcatgccatccgtaagatgcttttctgtgactggtgagtactcaaccaagtcattctgagaatagtgtatgcggcgaccgagttgctcttgcccggcgtcaatacgggataataccgcgccacatagcagaactttaaaagtgctcatcattggaaaacgttcttcggggcgaaaactctcaaggatcttaccgctgttgagatccagttcgatgtaacccactcgtgcacccaactgatcttcagcatcttttactttcaccagcgtttctgggtgagcaaaaacaggaaggcaaaatgccgcaaaaaagggaataagggcgacacggaaatgttgaatactcatactcttcctttttcaatattattgaagcatttatcagggttattgtctcatgagcggatacatatttgaatgtatttagaaaaataaacaaataggggttccgcgcacatttccccgaaaagtgccacctgacgtc

SEQ ID NO: 124 - DNA, 7504 bp, synthetic construct
  source 1..7504: mol_type = other DNA
gacggatcgggagatctcccgatcccctatggtgcactctcagtacaatctgctctgatgccgcatagttaagccagtatctgctccctgcttgtgtgttggaggtcgctgagtagtgcgcgagcaaaatttaagctacaacaaggcaaggcttgaccgacaattgcatgaagaatctgcttagggttaggcgttttgcgctgcttcgcgatgtacgggccagatatacgcgttgacattgattattgactagttattaatagtaatcaattacggggtcattagttcatagcccatatatggagttccgcgttacataacttacggtaaatggcccgcctggctgaccgcccaacgacccccgcccattgacgtcaataatgacgtatgttcccatagtaacgccaatagggactttccattgacgtcaatgggtggagtatttacggtaaactgcccacttggcagtacatcaagtgtatcatatgccaagtacgccccctattgacgtcaatgacggtaaatggcccgcctggcattatgcccagtacatgaccttatgggactttcctacttggcagtacatctacgtattagtcatcgctattaccatggtgatgcggttttggcagtacatcaatgggcgtggatagcggtttgactcacggggatttccaagtctccaccccattgacgtcaatgggagtttgttttggcaccaaaatcaacgggactttccaaaatgtcgtaacaactccgccccattgacgcaaatgggcggtaggcgtgtacggtgggaggtctatataagcagagctctctggctaactagagaacccactgcttactggcttatcgaaattaatacgactcactatagggagacccaagctggctagccaccgagaataaactagtattcttctggtccccacagactcagagagaacccgccaccatggacgccatgaagagaggcctgtgctgcgtgctgctgctgtgcggcgccgtgttcgtgagccctagcagggtccaaccaacagagagcattgtgaggtttccaaacatcaccaacctgtgtccatttgacgaggtgttcaacgccaccaggtttgcctctgtctatgcctggaacaggaagaggattagcaactgtgtggctgactactctgtgctctacaacttcgcccccttcttcgccttcaagtgttatggagtgagcccaaccaaactgaatgacctgtgtttcaccaatgtctatgctgactcctttgtgattaggggaaacgaggtgagccagattgcccctggacaaacaggcaacattgctgactacaactacaaactgcctgatgacttcacaggctgtgtgattgcctggaacagcaacaagctggacagcaaggtgggcggcaactacaactacctctacagactgttcaggaagagcaacctgaaaccatttgagagggacatcagcacagagatttaccaggctggcaacaagccatgtaatggagtggccggcttcaactgttactttccactccggtcctatggcttccggccaacctacggagtgggccaccaaccatacagggtggtggtgctgtcctttgaactgctccatgcccctgccacagtgtgtggaccaaagaagagcaccaacctggtgaagaacaagtgtgtgaacttcggctcaggtggttacataccagaggcacccagggacggtcaggcctatgtgaggaaagacggtgagtgggtgttgctgtccacgtttctcggcggtggcggttccggcggtggtgggtctatgcttggccctgattgtccgccacctccaccgcccccgccacccaacaacaataacaataataatagtaagcatacaggtcataagagtgcgtgcgttcctaatatgacagagcggcgcagggatgaactgtccgaagaaattaataaccttagggaaaaagtaatgaagcaatccgaggaaaataataatttgcaatctcaagtgcagaaactcacggaagaaaataccacgcttagagaacaggtggagccgactccagaggacgaagatgatgatattgagctcaggggcgctgcagctgccgcagctcctccacctccgatagaggaagagtgtcctgaagacttgcctgaaaagttcgacggcaaccctgacatgttggcaccttttatggctcagtgtcagatatttatggagaagagtaccagggatttttcagtcgatcgcgttcgcgtctgcttcgtgacgagcatgatgaccggtagagctgctcgatgggcttcagctaagcttgaacgctcccactatcttatgcataattatccggcatttatgatggagatgaagcacgtgtttgaagacccccagcgcagggaggtcgctaaaaggaagataaggagactcagacaaggaatgggttctgtcattgattattctaacgctttccagatgatagcacaggatcttgattggaatgaacccgctcttattgaccagtaccacgaaggtctctcagaccatatccaagaagaactttcacatctggaggtcgctaagagcctgtctgctctcattggtcagtgtatccatatagagcggcggctcgcaagggcggctgcggccagaaaaccccgatccccgccccgagccctcgtcctgccccatattgcctctcatcatcaagtagatcctaccgagcctgtgggaggagcgcggatgcggcttacccaagaggaatgataatagctcgagctggtactgcatgcacgcaatgctagctgcccctttcccgtcctgggtaccccgagtctcccccgacctcgggtcccaggtatgctcccacctccacctgccccactcaccacctctgctagttccagacacctcccaagcacgcagcaatgcagctcaaaacgcttagcctagccacacccccacgggaaacagcagtgattaacctttagcaataaacgaaagtttaactaagctatactaaccccagggttggtcaatttcgtgccagccacaccctggagctagcaaaccgctgatcagcctcgactgtgccttctagttgccagccatctgttgtttgcccctcccccgtgccttccttgaccctggaaggtgccactcccactgtcctttcctaataaaatgaggaaattgcatcgcattgtctgagtaggtgtcattctattctggggggtggggtggggcaggacagcaagggggaggattgggaagacaatagcaggcatgctggggatgcggtgggctctatggcttctgaggcggaaagaaccagctggggctctagggggtatccccacgcgccctgtagcggcgcattaagcgcggcgggtgtggtggttacgcgcagcgtgaccgctacacttgccagcgccctagcgcccgctcctttcgctttcttcccttcctttctcgccacgttcgccggctttccccgtcaagctctaaatcgggggctccctttagggttccgatttagtgctttacggcacctcgaccccaaaaaacttgattagggtgatggttcacgtagtgggccatcgccctgatagacggtttttcgccctttgacgttggagtccacgttctttaatagtggactcttgttccaaactggaacaacactcaaccctatctcggtctattcttttgatttataagggattttgccgatttcggcctattggttaaaaaatgagctgatttaacaaaaatttaacgcgaattaattctgtggaatgtgtgtcagttagggtgtggaaagtccccaggctccccagcaggcagaagtatgcaaagcatgcatctcaattagtcagcaaccaggtgtggaaagtccccaggctccccagcaggcagaagtatgcaaagcatgcatctcaattagtcagcaaccatagtcccgcccctaactccgcccatcccgcccctaactccgcccagttccgcccattctccgccccatggctgactaattttttttatttatgcagaggccgaggccgcctctgcctctgagctattccagaagtagtgaggaggcttttttggaggcctaggcttttgcaaaaagctcccgggagcttgtatatccattttcggatctgatcaagagacaggatgaggatcgtttcgcatgattgaacaagatggattgcacgcaggttctccggccgcttgggtggagaggctattcggctatgactgggcacaacagacaatcggctgctctgatgccgccgtgttccggctgtcagcgcaggggcgcccggttctttttgtcaagaccgacctgtccggtgccctgaatgaactgcaggacgaggcagcgcggctatcgtggctggccacgacgggcgttccttgcgcagctgtgctcgacgttgtcactgaagcgggaagggactggctgctattgggcgaagtgccggggcaggatctcctgtcatctcaccttgctcctgccgagaaagtatccatcatggctgatgcaatgcggcggctgcatacgcttgatccggctacctgcccattcgaccaccaagcgaaacatcgcatcgagcgagcacgtactcggatggaagccggtcttgtcgatcaggatgatctggacgaagagcatcaggggctcgcgccagccgaactgttcgccaggctcaaggcgcgcatgcccgacggcgaggatctcgtcgtgacccatggcgatgcctgcttgccgaatatcatggtggaaaatggccgcttttctggattcatcgactgtggccggctgggtgtggcggaccgctatcaggacatagcgttggctacccgtgatattgctgaagagcttggcggcgaatgggctgaccgcttcctcgtgctttacggtatcgccgctcccgattcgcagcgcatcgccttctatcgccttcttgacgagttcttctgagcgggactctggggttcgaaatgaccgaccaagcgacgcccaacctgccatcacgagatttcgattccaccgccgccttctatgaaaggttgggcttcggaatcgttttccgggacgccggctggatgatcctccagcgcggggatctcatgctggagttcttcgcccaccccaacttgtttattgcagcttataatggttacaaataaagcaatagcatcacaaatttcacaaataaagcatttttttcactgcattctagttgtggtttgtccaaactcatcaatgtatcttatcatgtctgtataccgtcgacctctagctagagcttggcgtaatcatggtcatagctgtttcctgtgtgaaattgttatccgctcacaattccacacaacatacgagccggaagcataaagtgtaaagcctggggtgcctaatgagtgagctaactcacattaattgcgttgcgctcactgcccgctttccagtcgggaaacctgtcgtgccagctgcattaatgaatcggccaacgcgcggggagaggcggtttgcgtattgggcgctcttccgcttcctcgctcactgactcgctgcgctcggtcgttcggctgcggcgagcggtatcagctcactcaaaggcggtaatacggttatccacagaatcaggggataacgcaggaaagaacatgtgagcaaaaggccagcaaaaggccaggaaccgtaaaaaggccgcgttgctggcgtttttccataggctccgcccccctgacgagcatcacaaaaatcgacgctcaagtcagaggtggcgaaacccgacaggactataaagataccaggcgtttccccctggaagctccctcgtgcgctctcctgttccgaccctgccgcttaccggatacctgtccgcctttctcccttcgggaagcgtggcgctttctcatagctcacgctgtaggtatctcagttcggtgtaggtcgttcgctccaagctgggctgtgtgcacgaaccccccgttcagcccgaccgctgcgccttatccggtaactatcgtcttgagtccaacccggtaagacacgacttatcgccactggcagcagccactggtaacaggattagcagagcgaggtatgtaggcggtgctacagagttcttgaagtggtggcctaactacggctacactagaagaacagtatttggtatctgcgctctgctgaagccagttaccttcggaaaaagagttggtagctcttgatccggcaaacaaaccaccgctggtagcggtggtttttttgtttgcaagcagcagattacgcgcagaaaaaaaggatctcaagaagatcctttgatcttttctacggggtctgacgctcagtggaacgaaaactcacgttaagggattttggtcatgagattatcaaaaaggatcttcacctagatccttttaaattaaaaatgaagttttaaatcaatctaaagtatatatgagtaaacttggtctgacagttaccaatgcttaatcagtgaggcacctatctcagcgatctgtctatttcgttcatccatagttgcctgactccccgtcgtgtagataactacgatacgggagggcttaccatctggccccagtgctgcaatgataccgcgagacccacgctcaccggctccagatttatcagcaataaaccagccagccggaagggccgagcgcagaagtggtcctgcaactttatccgcctccatccagtctattaattgttgccgggaagctagagtaagtagttcgccagttaatagtttgcgcaacgttgttgccattgctacaggcatcgtggtgtcacgctcgtcgtttggtatggcttcattcagctccggttcccaacgatcaaggcgagttacatgatcccccatgttgtgcaaaaaagcggttagctccttcggtcctccgatcgttgtcagaagtaagttggccgcagtgttatcactcatggttatggcagcactgcataattctcttactgtcatgccatccgtaagatgcttttctgtgactggtgagtactcaaccaagtcattctgagaatagtgtatgcggcgaccgagttgctcttgcccggcgtcaatacgggataataccgcgccacatagcagaactttaaaagtgctcatcattggaaaacgttcttcggggcgaaaactctcaaggatcttaccgctgttgagatccagttcgatgtaacccactcgtgcacccaactgatcttcagcatcttttactttcaccagcgtttctgggtgagcaaaaacaggaaggcaaaatgccgcaaaaaagggaataagggcgacacggaaatgttgaatactcatactcttcctttttcaatattattgaagcatttatcagggttattgtctcatgagcggatacatatttgaatgtatttagaaaaataaacaaataggggttccgcgcacatttccccgaaaagtgccacctgacgtc

SEQ ID NO: 125 - DNA, 6544 bp, synthetic construct
  source 1..6544: mol_type = other DNA
gacggatcgggagatctcccgatcccctatggtgcactctcagtacaatctgctctgatgccgcatagttaagccagtatctgctccctgcttgtgtgttggaggtcgctgagtagtgcgcgagcaaaatttaagctacaacaaggcaaggcttgaccgacaattgcatgaagaatctgcttagggttaggcgttttgcgctgcttcgcgatgtacgggccagatatacgcgttgacattgattattgactagttattaatagtaatcaattacggggtcattagttcatagcccatatatggagttccgcgttacataacttacggtaaatggcccgcctggctgaccgcccaacgacccccgcccattgacgtcaataatgacgtatgttcccatagtaacgccaatagggactttccattgacgtcaatgggtggagtatttacggtaaactgcccacttggcagtacatcaagtgtatcatatgccaagtacgccccctattgacgtcaatgacggtaaatggcccgcctggcattatgcccagtacatgaccttatgggactttcctacttggcagtacatctacgtattagtcatcgctattaccatggtgatgcggttttggcagtacatcaatgggcgtggatagcggtttgactcacggggatttccaagtctccaccccattgacgtcaatgggagtttgttttggcaccaaaatcaacgggactttccaaaatgtcgtaacaactccgccccattgacgcaaatgggcggtaggcgtgtacggtgggaggtctatataagcagagctctctggctaactagagaacccactgcttactggcttatcgaaattaatacgactcactatagggagacccaagctggctagccaccgagaataaactagtattcttctggtccccacagactcagagagaacccgccaccatggacgccatgaagagaggcctgtgctgcgtgctgctgctgtgcggcgccgtgttcgtgagccctagcagggtccaaccaacagagagcattgtgaggtttccaaacatcaccaacctgtgtccatttgacgaggtgttcaacgccaccaggtttgcctctgtctatgcctggaacaggaagaggattagcaactgtgtggctgactactctgtgctctacaacttcgcccccttcttcgccttcaagtgttatggagtgagcccaaccaaactgaatgacctgtgtttcaccaatgtctatgctgactcctttgtgattaggggaaacgaggtgagccagattgcccctggacaaacaggcaacattgctgactacaactacaaactgcctgatgacttcacaggctgtgtgattgcctggaacagcaacaagctggacagcaaggtgggcggcaactacaactacctctacagactgttcaggaagagcaacctgaaaccatttgagagggacatcagcacagagatttaccaggctggcaacaagccatgtaatggagtggccggcttcaactgttactttccactccggtcctatggcttccggccaacctacggagtgggccaccaaccatacagggtggtggtgctgtcctttgaactgctccatgcccctgccacagtgtgtggaccaaagaagagcaccaacctggtgaagaacaagtgtgtgaacttcggcagcggcggctacatccccgaggcccctagagacggccaagcctacgtgagaaaggacggcgaatgggtactcctgagcaccttcctgggtggcggaggcagcggcgggggaggcagctgataatagctcgagctggtactgcatgcacgcaatgctagctgcccctttcccgtcctgggtaccccgagtctcccccgacctcgggtcccaggtatgctcccacctccacctgccccactcaccacctctgctagttccagacacctcccaagcacgcagcaatgcagctcaaaacgcttagcctagccacacccccacgggaaacagcagtgattaacctttagcaataaacgaaagtttaactaagctatactaaccccagggttggtcaatttcgtgccagccacaccctggagctagcaaaccgctgatcagcctcgactgtgccttctagttgccagccatctgttgtttgcccctcccccgtgccttccttgaccctggaaggtgccactcccactgtcctttcctaataaaatgaggaaattgcatcgcattgtctgagtaggtgtcattctattctggggggtggggtggggcaggacagcaagggggaggattgggaagacaatagcaggcatgctggggatgcggtgggctctatggcttctgaggcggaaagaaccagctggggctctagggggtatccccacgcgccctgtagcggcgcattaagcgcggcgggtgtggtggttacgcgcagcgtgaccgctacacttgccagcgccctagcgcccgctcctttcgctttcttcccttcctttctcgccacgttcgccggctttccccgtcaagctctaaatcgggggctccctttagggttccgatttagtgctttacggcacctcgaccccaaaaaacttgattagggtgatggttcacgtagtgggccatcgccctgatagacggtttttcgccctttgacgttggagtccacgttctttaatagtggactcttgttccaaactggaacaacactcaaccctatctcggtctattcttttgatttataagggattttgccgatttcggcctattggttaaaaaatgagctgatttaacaaaaatttaacgcgaattaattctgtggaatgtgtgtcagttagggtgtggaaagtccccaggctccccagcaggcagaagtatgcaaagcatgcatctcaattagtcagcaaccaggtgtggaaagtccccaggctccccagcaggcagaagtatgcaaagcatgcatctcaattagtcagcaaccatagtcccgcccctaactccgcccatcccgcccctaactccgcccagttccgcccattctccgccccatggctgactaattttttttatttatgcagaggccgaggccgcctctgcctctgagctattccagaagtagtgaggaggcttttttggaggcctaggcttttgcaaaaagctcccgggagcttgtatatccattttcggatctgatcaagagacaggatgaggatcgtttcgcatgattgaacaagatggattgcacgcaggttctccggccgcttgggtggagaggctattcggctatgactgggcacaacagacaatcggctgctctgatgccgccgtgttccggctgtcagcgcaggggcgcccggttctttttgtcaagaccgacctgtccggtgccctgaatgaactgcaggacgaggcagcgcggctatcgtggctggccacgacgggcgttccttgcgcagctgtgctcgacgttgtcactgaagcgggaagggactggctgctattgggcgaagtgccggggcaggatctcctgtcatctcaccttgctcctgccgagaaagtatccatcatggctgatgcaatgcggcggctgcatacgcttgatccggctacctgcccattcgaccaccaagcgaaacatcgcatcgagcgagcacgtactcggatggaagccggtcttgtcgatcaggatgatctggacgaagagcatcaggggctcgcgccagccgaactgttcgccaggctcaaggcgcgcatgcccgacggcgaggatctcgtcgtgacccatggcgatgcctgcttgccgaatatcatggtggaaaatggccgcttttctggattcatcgactgtggccggctgggtgtggcggaccgctatcaggacatagcgttggctacccgtgatattgctgaagagcttggcggcgaatgggctgaccgcttcctcgtgctttacggtatcgccgctcccgattcgcagcgcatcgccttctatcgccttcttgacgagttcttctgagcgggactctggggttcgaaatgaccgaccaagcgacgcccaacctgccatcacgagatttcgattccaccgccgccttctatgaaaggttgggcttcggaatcgttttccgggacgccggctggatgatcctccagcgcggggatctcatgctggagttcttcgcccaccccaacttgtttattgcagcttataatggttacaaataaagcaatagcatcacaaatttcacaaataaagcatttttttcactgcattctagttgtggtttgtccaaactcatcaatgtatcttatcatgtctgtataccgtcgacctctagctagagcttggcgtaatcatggtcatagctgtttcctgtgtgaaattgttatccgctcacaattccacacaacatacgagccggaagcataaagtgtaaagcctggggtgcctaatgagtgagctaactcacattaattgcgttgcgctcactgcccgctttccagtcgggaaacctgtcgtgccagctgcattaatgaatcggccaacgcgcggggagaggcggtttgcgtattgggcgctcttccgcttcctcgctcactgactcgctgcgctcggtcgttcggctgcggcgagcggtatcagctcactcaaaggcggtaatacggttatccacagaatcaggggataacgcaggaaagaacatgtgagcaaaaggccagcaaaaggccaggaaccgtaaaaaggccgcgttgctggcgtttttccataggctccgcccccctgacgagcatcacaaaaatcgacgctcaagtcagaggtggcgaaacccgacaggactataaagataccaggcgtttccccctggaagctccctcgtgcgctctcctgttccgaccctgccgcttaccggatacctgtccgcctttctcccttcgggaagcgtggcgctttctcatagctcacgctgtaggtatctcagttcggtgtaggtcgttcgctccaagctgggctgtgtgcacgaaccccccgttcagcccgaccgctgcgccttatccggtaactatcgtcttgagtccaacccggtaagacacgacttatcgccactggcagcagccactggtaacaggattagcagagcgaggtatgtaggcggtgctacagagttcttgaagtggtggcctaactacggctacactagaagaacagtatttggtatctgcgctctgctgaagccagttaccttcggaaaaagagttggtagctcttgatccggcaaacaaaccaccgctggtagcggtggtttttttgtttgcaagcagcagattacgcgcagaaaaaaaggatctcaagaagatcctttgatcttttctacggggtctgacgctcagtggaacgaaaactcacgttaagggattttggtcatgagattatcaaaaaggatcttcacctagatccttttaaattaaaaatgaagttttaaatcaatctaaagtatatatgagtaaacttggtctgacagttaccaatgcttaatcagtgaggcacctatctcagcgatctgtctatttcgttcatccatagttgcctgactccccgtcgtgtagataactacgatacgggagggcttaccatctggccccagtgctgcaatgataccgcgagacccacgctcaccggctccagatttatcagcaataaaccagccagccggaagggccgagcgcagaagtggtcctgcaactttatccgcctccatccagtctattaattgttgccgggaagctagagtaagtagttcgccagttaatagtttgcgcaacgttgttgccattgctacaggcatcgtggtgtcacgctcgtcgtttggtatggcttcattcagctccggttcccaacgatcaaggcgagttacatgatcccccatgttgtgcaaaaaagcggttagctccttcggtcctccgatcgttgtcagaagtaagttggccgcagtgttatcactcatggttatggcagcactgcataattctcttactgtcatgccatccgtaagatgcttttctgtgactggtgagtactcaaccaagtcattctgagaatagtgtatgcggcgaccgagttgctcttgcccggcgtcaatacgggataataccgcgccacatagcagaactttaaaagtgctcatcattggaaaacgttcttcggggcgaaaactctcaaggatcttaccgctgttgagatccagttcgatgtaacccactcgtgcacccaactgatcttcagcatcttttactttcaccagcgtttctgggtgagcaaaaacaggaaggcaaaatgccgcaaaaaagggaataagggcgacacggaaatgttgaatactcatactcttcctttttcaatattattgaagcatttatcagggttattgtctcatgagcggatacatatttgaatgtatttagaaaaataaacaaataggggttccgcgcacatttccccgaaaagtgccacctgacgtc
